(19) United States
(12) Patent Application Publication
(10) Pub. No.: US 2023/0037234 A1
(43) Pub. Date: Feb. 2, 2023

(54) ENGINEERED CELLS FOR PRODUCTION OF CANNABINOIDS AND OTHER MALONYL-CoA-DERIVED PRODUCTS

(71) Applicant: Genomatica, Inc., San Diego, CA (US)

(72) Inventors: Jingyi Li, San Diego, CA (US); Pierre DeWals, San Diego, CA (US); Andreas Schirmer, San Diego, CA (US); Sankha Ghatak, San Diego, CA (US); David Ryan Georgianna, San Diego, CA (US)

(21) Appl. No.: 17/780,421

(22) PCT Filed: Nov. 25, 2020
(86) PCT No.: PCT/US2020/062308

§ 371 Date: May 26, 2022

Related U.S. Application Data
(60) Provisional application No. 62/941,551, filed on Nov. 27, 2019.
(60) Provisional application No. 63/044,736, filed on Jun. 26, 2020.

(51) Int. Cl. C12N 15/52; C12P 7/42; C12P 19/32; C12P 7/06

(52) U.S. Cl. CPC C12N 15/52; C12P 7/42; C12P 19/32; C12P 7/06; C12Y 203/01009; C12Y 404/01026

(57) ABSTRACT

The invention relates to engineered microorganisms (e.g., E. coli) and associated improvements for increasing the production cannabinoids (e.g. CBGA) or precursors or derivatives thereof.

### CROSS REFERENCE TO RELATED APPLICATIONS

[0001] This application claims the benefit of U.S. Provisional Patent Application Ser. No. 62/941,551 filed Nov. 27, 2019, and U.S. Provisional Patent Application Ser. No. 63/044,736 filed Jun. 26, 2020, both entitled ENGINEERED CELLS FOR PRODUCTION OF CANNABINOIDS AND OTHER MALONYL-CoA-DERIVED PRODUCTS, the disclosures of which are incorporated herein by reference. The entire content of the ASCII text file entitled “GNO0118WO_Sequence_Listing.txt” created on Nov. 25, 2020, having a size of 2323 kilobytes is incorporated herein by reference.

### FIELD OF THE INVENTION

[0002] The invention relates to engineered microorganisms and associated improvements for increasing the availability of malonyl-CoA inside the cell and for the production of cannabinoids and other malonyl-CoA-derived products or derivatives thereof.

### BACKGROUND OF THE INVENTION

[0003] The following description of the background of the invention is provided simply as an aid in understanding the invention and is not admitted to describe or constitute prior art to the invention.

[0004] Cannabinoids are prenylated isoprenoids found naturally in the plant Cannabis sativa. A Cannabis sativa plant may contain over a hundred different cannabinoids which may have different physiological effects. For example, the cannabinoid tetrahydrocannabinol (THC) is responsible for the well-known psychotropic effects of Cannabis extracts, whereas cannabidiol (CBD) lacks these effects but has been demonstrated to reduce inflammation. Recently, CBD and other cannabinoids have drawn a wider and significant scientific interest their potential to treat a wide array of disorders including insomnia, chronic pain, epilepsy, and post-traumatic stress disorder (Babson et al. (2017) Curr. Psychiatry Rep. 19:23; Romero-Sandoval et al. (2017) Curr. Rheumatol. Rep. 19:67; O'Connell et al. (2017) Epilepsy Behav. 70:341-348; Zir-Aviv et al. (2016) Behav. Pharmacol. 27:561-569). Further research into this class of compounds depends upon achieving higher levels of purity and producing greater quantities than ever before. However, purifying individual cannabinoid species from the Cannabis sativa plant is time-consuming and costly, and often results in low yields of many minor cannabinoid species which may be present as only a small fraction of the total cannabinoid in the plant. Thus, engineered cells are a useful alternative for the production of a specific cannabinoid or cannabinoid precursor, and may be used to increase the quantity, purity, and efficiency of cannabinoid production.

[0005] The cannabinoid pathway is complex, requiring the synthesis of several precursors necessary for the production of cannabigerolic acid (CBGA), the “mother cannabinoid”, or analogs thereof, from which other cannabinoids may be synthesized. Many of the CBGA precursors and other reactants in the cannabinoid synthetic pathways are limiting and/or are used in competing pathways in naturally-occurring and engineered host cells. Thus, it is desirable to develop engineered cells (e.g., microorganisms) that are modified for increased production of cannabinoid precursors and reactants, CBGA, and/or other cannabinoids or derivatives thereof.

### SUMMARY

[0006] In one aspect, the invention provides an engineered cell for producing a cannabinoid (or derivative thereof), wherein the cell comprises one or more of the following modifications:

(i) express an exogenous nucleic acid sequence encoding an olivetol synthase;
(ii) express an exogenous nucleic acid sequence encoding an olivetolic acid cyclase;
(iii) express an exogenous nucleic acid sequence encoding a prenyltransferase; and one or more of the following modifications:
(iv) express one or more exogenous nucleic acid sequences or overexpress one or more endogenous genes encoding a protein having an ABC transporter permease;
(v) express one or more exogenous nucleic acid sequences or overexpress one or more endogenous genes encoding a protein having an ABC transporter ATP-binding protein activity;
(vi) express one or more exogenous nucleic acids sequences or overexpress one or more endogenous genes that encodes a protein that is at least 60% identical to: the blc gene product of SEQ ID NO: 147, ybhG gene product of SEQ ID NO: 116, or the ydhC gene product of SEQ ID NO: 148, or EmrB/QacA subfamily drug resistance transporters, such as the pur8 protein, of one of SEQ ID NOs: 210-214;
(vii) express one or more exogenous nucleic acids sequences or overexpress one or more endogenous genes that encodes a protein that is at least 60% identical to the mlaD gene product of SEQ ID NO: 149, the mlaE gene product of SEQ ID NO: 150, or the mlaF gene product of SEQ ID NO: 151;
(viii) express one or more exogenous nucleic acid sequences or overexpress one or more endogenous genes encoding a protein having a siderophore receptor protein activity or overexpress one or more endogenous genes encoding a protein having a siderophore receptor protein activity;
(ix) a disruption of or downregulation in the expression of a regulator of expression of one or more endogenous genes encoding a protein having an ABC transporter permease activity, a protein having an ABC transporter ATP-binding protein activity, a blc gene, a ybhG protein, a ydhC protein, an EmrB/QacA subfamily drug resistance transporter, a mlaD protein, mlaE protein, mlaF protein, or a protein having a siderophore receptor protein activity;
(x) express an exogenous nucleic acid encoding a multi-domain protein having acetyl-CoA carboxylase activity (MD-ACC);
(xi) overexpress one or more endogenous genes encoding acetyl-CoA carboxyltransferase subunit α, biotin carboxyl carrier protein, biotin carboxylase, or acetyl-CoA carboxyltransferase subunit β, or express one or more exogenous genes encoding acetyl-CoA carboxyltransferase, biotin carboxyl carrier protein, or biotin carboxylase activities;
(xii) disruption of or downregulation in the expression of an endogenous gene encoding a protein having (acyl-carrier-protein)S-malonyltransferase activity, an endogenous gene encoding a protein having 3-hydroxypalmitoyl-(acyl-carrier-protein) dehydratase activity, or both;
(xiii) express an exogenous nucleic acid sequence or overexpress an endogenous gene encoding a protein having fatty acyl-CoA ligase activity, or both;
(xiv) disruption of or downregulation in the expression of at least one endogenous gene encoding a protein having acyl-CoA dehydrogenase activity or enoyl-CoA hydratase activity;
(xv) a disruption or downregulation in the expression of at least one endogenous gene encoding a protein having acyl-CoA esterase/thioesterase activity;
(xvi) disruption of or downregulation in the expression of at least one endogenous gene encoding a repressor of transcription of one or more genes required for fatty acid beta-oxidation or an upregulator of fatty acid biosynthesis in combination with disruption or downregulation of one or more endogenous genes encoding one or more proteins of fatty acid beta-oxidation pathway;
(xvii) express an exogenous nucleic acid sequence or overexpress an endogenous gene encoding a protein having prenol kinase activity, prenol diphosphokinase activity, isoprenol kinase activity, isoprenol diphosphokinase activity, dimethylallyl phosphate kinase activity, isopentenyl (di)phosphate kinase activity, or isopentenyl diphosphate isomerase activity;
(xviii) express an exogenous nucleic acid sequence or overexpress an endogenous gene encoding a protein having GPP synthase activity;
(xix) express one or more exogenous nucleic acid sequences or overexpressing one or more endogenous genes encoding one or more enzymes of MVA pathway, MEP pathway, or a non-MVA, non-MEP pathway;
(xx) express an exogenous nucleic acid sequence or overexpress an endogenous gene encoding a biotin-(acetyl-CoA carboxylase) ligase;
(xxi) overexpress an endogenous gene encoding a isopentenyl-diphosphate delta-isomerase or express an exogenous nucleic acid sequence encoding a isopentenyl-diphosphate delta-isomerase;
(xxii) overexpress an endogenous genes encoding a hydroxyethylthiazole kinase or express an exogenous nucleic acid sequence encoding a hydroxyethylthiazole kinase or both;
(xxiii) express an exogenous nucleic acid sequence encoding a Type III pantothenate kinase or overexpress an endogenous gene encoding a Type III pantothenate kinase;
(xxiv) a disruption of or downregulation in the expression of at least one endogenous gene encoding a phosphatase selected from the group consisting of ADP-sugar pyrophosphatase, dihydroneopterin triphosphate diphosphatase, pyrimidine deoxynucleotide diphosphatase, pyrimidine pyrophosphate phosphatase, and Nudix hydrolase; wherein the engineered cell produces a cannabinoid (or derivative thereof);
(xxv) express one or more exogenous nucleic acid sequences or overexpress one or more endogenous genes encoding a protein that is a resistance-nodulation/-cell division (RND) transporter:
(xxvi) express one or more exogenous nucleic acid sequences or overexpress one or more endogenous genes encoding a protein that is a prokaryotic small multidrug (SMR) transporter; and
(xxvii) express one or more exogenous nucleic acid sequences or overexpress one or more endogenous genes encoding a protein that is a member of the major facilitator superfamily (MFS). In some embodiments, the engineered cell comprises at least two, three, four, five, six, seven, eight, nine, ten or more of the modifications. In some embodiments, the engineered cell comprises at least one, two, three, four, five, six, seven, eight, or more heterologous genes. In some embodiments, the engineered cell comprises and/or expresses at least one, two, three, four, five, six, seven, eight, or more non-naturally occurring proteins. In some embodiments, the engineered cell comprises the deletion or disruption of one, two, three, four, five, six, seven, eight or more endogenous genes. In some embodiments, the cell is engineered to express one, two, three, four, five, six, seven, eight or more endogenous genes, wherein the native promoter(s) of the endogenous gene(s) is/are replaced with one or more promoters that increase expression of the gene(s) relative to the expression in a control cell under the control of the native promoter. In some embodiments, the cell is engineered to express one, two, three, four, five, six, seven, eight, or more exogenous genes or overexpress one, two, three, four, five, six, seven, eight, or more endogenous genes in which one or more exogenous or endogenous gene is a non-natural variant of the naturally occurring endogenous gene. In some embodiments, the non-natural variant of the exogenous or endogenous gene comprise one or more amino acid substitutions, insertions, or deletions as compared to the naturally occurring genes.

[0007] In some embodiments the engineered cell expresses (a) exogenous nucleic acid sequences encoding (a1) olivetol synthase, (a2) olivetolic acid cyclase, (a3) prenyltransferase, and (a4) one or more genes of a MVA pathway, MEP pathway, or a non-MVA, non-MEP pathway; and (b) one or more of the following: (b1) an exogenous nucleic acid encoding a multi-domain protein having acetyl-CoA carboxylase activity (MD-ACC), or overexpress one or more endogenous genes encoding acetyl-CoA carboxyltransferase subunit α, biotin carboxyl carrier protein, biotin carboxylase, or acetyl-CoA carboxyltransferase subunit β, or expresses one or more exogenous genes encoding acetyl-CoA carboxyltransferase, biotin carboxyl carrier protein, or biotin carboxylase activities, (b2) express an exogenous nucleic acid sequence or overexpress an endogenous gene encoding a protein having fatty acyl-CoA ligase activity, or both; disruption of or downregulation in the expression of at least one endogenous gene encoding a repressor of transcription of one or more genes required for fatty acid beta-oxidation or an upregulator of fatty acid biosynthesis in combination with disruption or downregulation of one or more endogenous genes encoding one or more proteins of fatty acid beta-oxidation pathway; a disruption or downregulation in the expression of at least one endogenous gene encoding a protein having 3-oxoacyl-[acyl-carrier-protein] synthase activity, an endogenous gene encoding a protein having enoyl-[acyl-carrier-protein] reductase activity, and (b3) expresses one or more exogenous nucleic acid sequences or overexpress one or more endogenous genes encoding a protein having an ABC transporter permease; expresses one or more exogenous nucleic acid sequences or overexpress one or more endogenous genes encoding a protein having an ABC transporter ATP-binding protein activity; expresses one or more exogenous nucleic acids sequences or overexpress one or more endogenous genes that encodes a protein that is at least 60% identical to: the blc gene product of SEQ ID NO: 147, ybhG gene product of SEQ ID NO: 116, or the ydhC gene product of SEQ ID NO: 148, or EmrB/QacA subfamily drug resistance transporters, such as the pur8 protein, of one of SEQ ID NOs: 210-214, or expresses one or more exogenous nucleic acids sequences or overexpress one or more endogenous genes that encodes a protein that is at least 60% identical to the mlaD gene product of SEQ ID NO: 149, the mlaE gene product of SEQ ID NO: 150, the mlaF gene product of SEQ ID NO: 151, or the RND family MdtABC.

[0008] In some embodiments the engineered cell expresses: (a1)-(a4) and (b1); (a1)-(a4) and (b2); (a1)-(a4) and (b3); (a1)-(a4), (b1) and (b2); (a1)-(a4), (b1) and (b3); (a1)-(a4), (b2) and (b3); (a1)-(a4) and (b1)-(b3). In some embodiments, (b1) is expression of acetyl-CoA carboxyltransferase (ACC), such as C. glutamicum or M. circinelloides ACC, or a protein having >60%, ≥65%, ≥70%, ≥75%, ≥80%, ≥85%, ≥90%, ≥95%, ≥97%, ≥99%, or 100% identity to said sequences. In some embodiments, (b2) is deletion, disruption, or reduced expression of one or more of fabA, fabB, fabD, fabF, fabG, fabH, fabL, fadE, fadD, fadI, fadM, fadL, and fadR. In some embodiments (b3) is expression of one or more of blc, ybhG, ydhC, mlaD, mlaE, mlaF, or MdtABC, or a protein having >60%, ≥65%, ≥70%, ≥75%, ≥80%, ≥85%, ≥90%, ≥95%, ≥97%, ≥99%, or 100% identity to said sequences.

[0009] In another aspect, the invention provides an engineered cell, wherein the cell is engineered to express an exogenous nucleic acid encoding a multi-domain protein having acetyl-CoA carboxylase (ACC) activity and wherein the engineered cell produces more cannabinoid or derivatives thereof or combinations thereof than is produced by a control cell substantially identical to the engineered cell with the exception that the control cell is not engineered to express the exogenous nucleic acid encoding the multi-domain protein having ACC activity.

[0010] In another aspect, the invention provides an engineered cell, wherein the cell is engineered to express:

[0011] (a) an exogenous nucleic acid encoding a multi-domain protein having acetyl-CoA carboxylase (MD-ACC) activity; and

[0012] (b) at least one of:
[0013] (i) an exogenous nucleic acid encoding a natural or non-natural olivetol synthase;
[0014] (ii) an exogenous nucleic acid encoding an olivetolic acid cyclase; and
[0015] (iii) an exogenous nucleic acid encoding a natural or non-natural prenyltransferase.

[0016] In another aspect, the invention provides an engineered cell, wherein the cell is engineered:

(a) to express an exogenous nucleic acid encoding a multi-domain protein having acetyl-CoA carboxylase (MD-ACC) activity; and
(b) to further comprise one or more of the following modifications:
(i) a disruption or downregulation in the expression of an endogenous gene encoding a protein having (acyl-carrier-protein)S-malonyltransferase activity, an endogenous gene encoding a protein having 3-hydroxypalmitoyl-(acyl-carrier-protein) dehydratase activity, or both;
(ii) express an exogenous nucleic acid sequence or overexpress an endogenous gene encoding a protein having fatty acyl-CoA ligase activity, or both;
(iii) a disruption or downregulation in the expression of at least one endogenous gene encoding a protein having acyl-CoA dehydrogenase activity or enoyl-CoA hydratase activity;
(iv) a disruption or downregulation in the expression of at least one endogenous gene encoding a protein having acyl-CoA esterase/thioesterase activity;
(v) express an exogenous nucleic acid sequence or overexpress an endogenous gene encoding a protein having prenol kinase activity, prenol diphosphokinase activity, isoprenol kinase activity, isoprenol diphosphokinase activity, dimethylallyl phosphate kinase activity, isopentenyl (di)phosphate kinase activity, or isopentenyl diphosphate isomerase activity express a heterologous nucleic acid sequence or overexpress an endogenous gene encoding a protein having GPP synthase activity, or both;
(vi) express one or more exogenous nucleic acid sequences or overexpress one or more endogenous genes encoding a protein having an ABC transporter permease activity, express one or more exogenous nucleic acid sequences or overexpress one or more endogenous genes encoding a protein having an ABC transporter ATP-binding protein activity,
(vii) express one or more exogenous genes encoding an ABC transporter permease or ABC transporter ATP-binding protein that is capable of effecting cannabinoid (or derivatives thereof) efflux from the cell, wherein the native promoter of at least one of the one or more endogenous genes is replaced with a constitutive promoter that increases expression of the genes relative to the expression in a control cell with the native promoter; and
(viii) a disruption or downregulation in the expression of an ybiH gene.

[0017] In some embodiments, one or more modifications of the engineered cell increases the availability of malonyl-CoA in the engineered cell as compared to a control cell substantially identical to the engineered cell with the exception that the control cell does not comprise one or more of such modifications. In some embodiments, one or more modifications of the engineered cell increases the production of a cannabinoid (or derivative thereof) as compared to a control cell substantially identical to the engineered cell with the exception that the control cell does not comprise one or more of such modifications. In some embodiments, one or more modifications of the engineered cell increases the efflux of cannabinoid (or derivatives thereof) from the engineered cell as compared to a control cell substantially identical to the engineered cell with the exception that the control cell does not comprise one or more of such modifications.

[0018] In some embodiments, the multi-domain protein having acetyl-CoA carboxylase activity (EC 6.4.1.2) is exogenous to an engineered cell. In some embodiments, the multi-domain protein having acetyl-CoA carboxylase activity (EC 6.4.1.2) is heterologous to an engineered cell. Optionally, the multi-domain protein is a fungal multi-domain protein having acetyl-CoA carboxylase (ACC) activity. The fungal multi-domain protein may be derived from Mucor spp, Rhizopus spp. Aspergillus spp., Saccharomyces spp., or Yarrowia spp. In some embodiments, the multi-domain protein has a sequence that is at least 60%, 65%, 70%, 75%, 80%, 85%, 90%, 95%, 97%, 99%, or 100% identical to at least 50, 100, 150, 200, 250, or more contiguous amino acids of any one of the sequences of SEQ ID NOs: 1-100 and 208-209 and has acetyl-CoA carboxylase activity (EC 6.4.1.2). In some embodiments, the multi-domain protein has a sequence that is at least 60%, 65%, 70%, 75%, 80%, 85%, 90%, 95%, 97%, 99%, or 100% identical to the full length of any one of the sequences of SEQ ID NOs: 1-100 and 208-209 and has acetyl-CoA carboxylase activity (EC 6.4.1.2).

[0019] In some embodiments, the multi-domain protein is encoded by a nucleic acid sequence that is at least 60%, 65%, 70%, 75%, 80%, 85%, 90%, 95%, 99% identical to SEQ ID NO: 101. Optionally, the multi-domain protein is encoded by a nucleic acid sequence that is identical or substantially identical to SEQ ID NO: 101

[0020] In some embodiments of any of the foregoing aspects, a cell is engineered for a modification that causes a disruption or downregulation in the expression of an endogenous gene encoding a protein having (acyl-carrier-protein)S-malonyltransferase activity, an endogenous gene encoding a protein having 3-hydroxypalmitoyl-(acyl-carrier-protein) dehydratase activity, or both.

[0021] Optionally, the protein having (acyl-carrier-protein)S-malonyltransferase activity has an enzymatic activity of EC 2.3.1.39. Optionally, the protein having the (acyl-carrier-protein)S-malonyltransferase activity has an amino acid sequence that is identical or substantially identical to SEQ ID NO: 102. The protein having the (acyl-carrier-protein)S-malonyltransferase activity may be encoded by the fabD gene.

[0022] Optionally, the protein having 3-hydroxypalmitoyl-(acyl-carrier-protein) dehydratase activity has an enzymatic activity of EC 4.2.1.59. Optionally, the protein having 3-hydroxypalmitoyl-(acyl-carrier-protein) dehydratase activity has an amino acid sequence that is identical or substantially identical to SEQ ID NO: 103. The protein having 3-hydroxypalmitoyl-(acyl-carrier-protein) dehydratase activity may be encoded by the fabZ gene.

[0023] In some embodiments, the of any of the foregoing aspects, a cell is engineered for a modification that causes a disruption or downregulation in the expression of at least one endogenous gene encoding a protein having 3-oxoacyl-[acyl-carrier-protein] synthase activity, an endogenous gene encoding a protein having enoyl-[acyl-carrier-protein] reductase activity, or both.

[0024] Optionally, the protein having 3-oxoacyl-[acyl-carrier-protein] synthase activity is identical or substantially identical to a protein selected from the group consisting of FabF (SEQ ID NO: 193), FabB (SEQ ID NO: 194), and FabH (SEQ ID NO: 195). Optionally, the protein having enoyl-[acyl-carrier-protein] reductase activity is FabI (SEQ ID NO: 196).

[0025] In some embodiments of any of the foregoing aspects, an engineered cell having a disruption or downregulation in the expression of the endogenous gene encoding a protein having (acyl-carrier-protein)S-malonyltransferase activity, the endogenous gene encoding a protein having 3-hydroxypalmitoyl-(acyl-carrier-protein) dehydratase activity, or both has more malonyl-CoA available than in a by a control cell that is substantially identical to the engineered cell without the modifications.

[0026] In some embodiments of any of the foregoing aspects, the cell is engineered to express an exogenous nucleic acid sequence or overexpress an endogenous gene encoding a protein having fatty acyl-CoA ligase activity. Optionally, the protein having fatty acyl-CoA ligase activity has an enzymatic activity of EC 6.2.1.3. The exogenous nucleic acid sequence or the endogenous gene may be a fadD gene, or a variant thereof. In some embodiments, the fadD variant may be a non-naturally occurring variant. In some embodiments, the fadD variant comprises one or more amino acid substitutions as compared to the wild-type protein. Optionally, the exogenous nucleic acid sequence or the endogenous gene encodes a protein may be identical or substantially identical to SEQ ID NO: 104. In some embodiments, the cell makes more hexanoyl-CoA available than a control cell substantially identical to the engineered cell with the exception that the control cell is not engineered to express the exogenous nucleic acid sequence or overexpress the endogenous gene encoding a protein having fatty acyl-CoA ligase activity.

[0027] In some embodiments, in any of the foregoing aspects, a cell is engineered for a modification that causes a disruption or downregulation in the expression of at least one endogenous gene encoding a protein having acyl-CoA dehydrogenase activity or enoyl-CoA hydratase activity. Optionally, the protein having acyl-CoA dehydrogenase activity has an enzymatic activity of EC 1.3.8.1. The gene encoding the protein having acyl-CoA dehydrogenase activity encodes a protein having an amino acid sequence that may be identical or substantially identical to SEQ ID NO: 105. Optionally, the gene encoding a protein having acyl-CoA dehydrogenase activity is a fadE gene.

[0028] Optionally, the protein having enoyl-CoA hydratase activity has an enzymatic activity of EC 4.2.1.17. The gene encoding a protein having enoyl-CoA hydratase activity may encode a protein having an amino acid sequence that may be identical or substantially identical to SEQ ID NO: 106.

[0029] Optionally, the gene encoding a protein having enoyl-CoA hydratase activity is a fadB gene.

[0030] Optionally, a cell is engineered for a modification that causes a disruption or downregulation in the expression of an endogenous gene encoding a protein having acyl-CoA dehydrogenase activity and an endogenous gene encoding a protein having enoyl-CoA hydratase activity. The cell may be engineered for a modification that causes a disruption or downregulation in the expression of a fadB gene and a fadE gene.

[0031] In some embodiments of any of the foregoing aspects, a cell is engineered for a modification that causes a disruption or downregulation in the expression of at least one endogenous gene encoding a protein having acyl-CoA esterase/thioesterase activity. Optionally, the protein having acyl-CoA esterase/thioesterase activity has an enzymatic activity of EC 3.1.2.20. The gene encoding a protein having acyl-CoA esterase/thioesterase activity may encode a protein having an amino acid sequence that may be identical or substantially identical to any one of SEQ ID NOs: 107-109 and 197-198. For example, the gene encoding a protein having acyl-CoA esterase/thioesterase activity may be a tesB gene, a yciA gene, a ybgC gene, a tesA gene, ydiI, or a fadM gene. The cell may make more hexanoyl-CoA available than a control cell that is substantially identical to the engineered cell with the exception that the control cell is not engineered to cause a disruption or downregulation in the expression of at least one endogenous gene encoding a protein having acyl-CoA esterase/thioesterase activity.

[0032] In some embodiments of any of the foregoing aspects, a cell is engineered to:

[0033] (a) express an exogenous nucleic acid sequence or overexpress an endogenous gene encoding a protein having isopentenyl phosphate kinase activity,

[0034] (b) express an exogenous nucleic acid sequence or overexpress an endogenous gene encoding a protein having GPP synthase activity, or

[0035] (c) both.

[0036] Optionally, the protein having isopentenyl phosphate kinase activity has an enzymatic activity of EC 2.7.4.26. The exogenous nucleic acid sequence or the endogenous gene that encodes a protein having isopentenyl phosphate kinase activity may be an IPK gene. The exogenous nucleic acid sequence or the endogenous gene encodes a protein having isopentenyl phosphate kinase activity encodes a protein may be identical or substantially identical to SEQ ID NO: 110.

[0037] Optionally, the protein having GPP synthase activity has an enzymatic activity of EC 2.5.1.-. The exogenous nucleic acid sequence or the endogenous gene that encodes a protein having GPP synthase activity may be a GPP synthase (EC 2.5.1.1), an IspA gene or an IdsA gene. The exogenous nucleic acid sequence or the endogenous gene encodes a protein having GPP synthase activity may encode a protein that is identical or substantially identical to SEQ ID NO: 111 or SEQ ID NO: 112.

[0038] Optionally, the cell makes more GPP available than a control cell substantially identical to the engineered cell with the exception that the control cell is not so engineered to:

[0039] express a heterologous nucleic acid sequence or overexpress an endogenous gene encoding a protein having isopentenyl phosphate kinase (IPK) activity,

[0040] express a heterologous nucleic acid sequence or overexpress an endogenous gene encoding a protein having GPP synthase activity, or both.

[0041] In some embodiments of any of the foregoing aspects, the cell is engineered to

[0042] (a) express one or more exogenous nucleic acid sequences or overexpress one or more endogenous genes encoding a protein having an ABC transporter permease activity,

[0043] (b) express one or more exogenous nucleic acid sequences or overexpress one or more endogenous genes encoding a protein having an ABC transporter ATP-binding protein activity,

[0044] (c) express one or more exogenous nucleic acids sequences or overexpress one or more endogenous genes that encodes a protein that is identical or substantially identical to the blc gene product (SEQ ID NO: 147) the ydhC gene product (SEQ ID NO: 148), or EmrB/QacA subfamily drug resistance transporters, such as the pur8 protein, of one of SEQ ID NOs: 210-214;

[0045] (d) express one or more exogenous nucleic acids sequences or overexpress one or more endogenous genes encodes a protein that is identical or substantially identical to the mlaD gene product (SEQ ID NO: 149), the mlaE gene product (SEQ ID NO: 150), or the mlaF gene product (SEQ ID NO: 151), or

[0046] (e) any combination of (a)-(d).

[0047] Optionally, the protein having ABC transporter permease activity has an enzymatic activity of EC 7.6.2.2. At least one of the heterologous nucleic acid sequences or the endogenous genes may be selected from the group consisting of a ybhS gene, a ybhF gene, a ybhR gene, and a ybhG gene. The ybhS gene may encode a protein that is identical or substantially identical to SEQ ID NO: 113. The ybhF gene may encode a protein that is identical or substantially identical to SEQ ID NO: 114. The ybhR gene may encode a protein that is identical or substantially identical to SEQ ID NO: 115. The ybhG gene may encode a protein that is identical or substantially identical to SEQ ID NO: 116. The protein having ABC transporter permease activity may be identical or substantially identical to the protein encoded by UniProt protein sequence Q8XYF0 (RS_RS09125; SEQ ID NO: 190) or UniProt protein sequence Q8XYE9 (RS_RS09130; SEQ ID NO: 191). Optionally, the cell effluxes more cannabinoid (or derivatives thereof) than is effluxed by a control cell substantially identical to the engineered cell with the exception that the control cell is not so engineered. In some embodiments, the cannabinoid is cannabigerolic acid (CBGA), tetrahydrocannabivarin (THCV), tetrahydrocannabivarinic acid (THCVA), cannabidivarin (CBDV), cannabidivarinic acid (CBDVA), cannabinol (CBN), cannabinolic acid (CBNA), cannabidiol (CBD), cannabidiolic acid (CBDA), cannabichromene (CBC), cannabichromenic acid (CBCA), cannabigerivarin (CBGV), cannabigerivarinic acid (CBGVA), cannabigerol (CBG), Cannabichromevarin (CBCV), Cannabichromevarinic acid (CBCVA), tetrahydrocannabinol (THC), tetrahydrocannabinolic acid (THCA), analogs, or derivatives thereof, or combinations thereof.

[0048] In some embodiments, the of any of the foregoing aspects, the cell is engineered to express one or more endogenous gene encoding an ABC transporter permease or ABC transporter ATP-binding protein that is capable of effecting cannabinoid (or derivatives thereof) efflux from the cell, wherein the native promoter of at least one of the one or more endogenous genes is replaced with a promoter that increases expression of the genes relative to a the expression in a control cell with the native promoter. Optionally, the promoter is heterologous. The one or more of the endogenous genes may be selected from a ybhS gene, a ybhF gene, a ybhR gene, and a ybhG gene.

[0049] In some embodiments of any of the foregoing aspects, the cell is engineered for a modification that causes a disruption or downregulation in the expression of an ybiH gene. Optionally, the ybiH gene encodes a protein having an amino acid sequence that is identical or substantially identical to SEQ ID NO: 117. The disruption or downregulation in the expression of the ybiH gene may cause the cell to overexpress at least one endogenous genes encoding an ABC transporter permease or ABC transporter ATP-binding protein that is capable of effecting cannabinoid (or derivatives thereof) efflux from the cell relative to the expression of the at least one endogenous genes expressed by a control cell substantially identical to the engineered cell with the exception that the control cell is not engineered to cause a disruption or downregulation in the expression of the ybiH gene. The at least one endogenous gene encoding an ABC transporter permease may be selected from the group consisting of a ybhS gene, a ybhR gene, and a ybhG gene for the endogenous gene encoding the ABC transporter ATP-binding protein is a ybhF gene. In some embodiments, the cannabinoid is CBGA, THCV, THCVA, CBDV, CBDVA, CBN, CBNA, CBD, CBDA, CBC, CBCA, CBGV, CBGVA, CBG, CBCV, CBCVA, THC, THCA, analogs, or derivatives thereof, or combinations thereof.

[0050] In some embodiments, the protein having siderophore receptor protein is identical or substantially identical to the protein encoded by UniProt protein sequence Q8XYF1 (SEQ ID NO: 192).

[0051] In some embodiments, the protein having a repressor of transcription of one or more genes required for fatty acid beta-oxidation or an upregulator of fatty acid biosynthesis has an amino acid sequence that is identical or substantially identical to SEQ ID NO: 199. In some embodiments, that protein is encoded by the fadR gene. In some embodiments, the expression of fadR is attenuated or the fadR gene is deleted. In some embodiments, the engineered cell comprising an attenuated fadR expression or deleted fadR has more alkanoyl-CoA available as compared to a control cell that is substantially identical to the engineered cell without such attenuation of fadR expression or deletion of fadR. In some embodiments, the engineered cell increases the availability of alkanoyl-CoA as compared to a control cell that is substantially identical to the engineered cell with the exception that the control cell does not comprise one or more of such modifications.

[0052] In some embodiments, the Type III pantothenate kinase has an amino acid sequence that is identical or substantially identical to SEQ ID NO: 200. In some embodiments, the gene encoding the Type III pantothenate kinase is the coaX gene. In some embodiments, the engineered cell increases the availability of alkanoyl-CoA, acetyl-CoA, or malonyl-CoA, as compared to a control cell that is substantially identical to the engineered cell with the exception that the control cell does not comprise one or more of such modifications.

[0053] In some embodiments of any of the foregoing aspects and embodiments, the cell is engineered to express an exogenous nucleic acid sequence or overexpress an endogenous gene encoding a protein having biotin ligase activity. Optionally, the protein having biotin ligase activity has an enzymatic activity of EC:6.3.4.15. In some embodiments, the gene is a BirA gene or substantially identical to a BirA gene and/or encodes a protein that is substantially identical to the protein encoded by the BirA gene.

[0054] In another aspect, the invention provides an engineered cell, wherein the cell is engineered to

[0055] (a) express one or more exogenous nucleic acid sequences or overexpress one or more endogenous genes encoding a protein having an ABC transporter permease activity,

[0056] (b) express one or more exogenous nucleic acid sequences or overexpress one or more endogenous genes encoding a protein having an ABC transporter ATP-binding protein activity,

[0057] (c) express one or more exogenous nucleic acids sequences or overexpress one or more endogenous genes that encodes a protein that is at least 90% identical to: the blc gene product (SEQ ID NO: 147), the ydhC gene product (SEQ ID NO: 148), or EmrB/QacA subfamily drug resistance transporters, such as the pur8 protein, of one of SEQ ID NOs: 210-214;

[0058] (d) express one or more exogenous nucleic acids sequences or overexpress one or more endogenous genes encodes a protein that is at least 90% identical to the mlaD gene product (SEQ ID NO: 149), the mlaE gene product (SEQ ID NO: 150), or the mlaF gene product (SEQ ID NO: 151), or

[0059] (e) any combination of (a)-(d),

wherein the engineered cell effluxes more cannabinoid (or derivative thereof) than is effluxed by a control cell.

[0060] In another aspect, the invention provides an engineered cell, wherein the cell is engineered to express:

[0061] (a) at least one of:

(i) express one or more exogenous nucleic acid sequences or overexpress one or more endogenous genes encoding a protein having an ABC transporter permease activity,
(ii) express one or more exogenous nucleic acid sequences or overexpress one or more endogenous genes encoding a protein having an ABC transporter ATP-binding protein activity,
(iii) express one or more exogenous nucleic acids sequences or overexpress one or more endogenous genes that encodes a protein that is at least 90% identical to: the blc gene product (SEQ ID NO: 147), the ydhC gene product (SEQ ID NO: 148), or EmrB/QacA subfamily drug resistance transporters, such as the pur8 protein, of one of SEQ ID NOs: 210-214;
(iv) express one or more exogenous nucleic acids sequences or overexpress one or more endogenous genes encodes a protein that is at least 90% identical to the mlaD gene product (SEQ ID NO: 149), the mlaE gene product (SEQ ID NO: 150), or the mlaF gene product (SEQ ID NO: 151), or
(v) any combination of (i)-(iv), and

[0062] (b) at least one of:

(vi) an exogenous nucleic acid encoding a natural or non-natural olivetol synthase;
(vii) an exogenous nucleic acid encoding an olivetolic acid cyclase; and
(viii) an exogenous nucleic acid encoding a natural or non-natural prenyltransferase.

[0063] In some embodiments of these aspects, the protein having ABC transporter permease activity has an enzymatic activity of EC 7.6.2.2. The heterologous nucleic acid sequences or the endogenous genes may be selected from the group consisting of a ybhS gene, a ybhF gene, a ybhR gene, and a ybhG gene. The ybhS gene may encode a protein that is identical or substantially identical to SEQ ID NO: 113. The ybhF gene may encode a protein that is identical or substantially identical to SEQ ID NO: 114. The ybhR gene may encode a protein that is identical or substantially identical to SEQ ID NO: 115. The ybhG gene may encode a protein that is identical or substantially identical to SEQ ID NO: 116. The protein having ABC transporter permease activity may be identical or substantially identical to the protein encoded by UniProt protein sequence Q8XYF0 (SEQ ID NO: 190) or UniProt protein sequence Q8XYE9 (SEQ ID NO: 191). Other ABC-type transporters include the following genes from E. coli: msbA (UniProt P60752; SEQ ID NO: 215), macAB, (UniProt P75830, P75831; SEQ ID NO: 216), mdlAB (UniProt P77265, P0AAG5; SEQ ID NO: 217), yadGH (UniProt P36879, P0AFN6; SEQ ID NO: 218), ybbAP (UniProt P0A9T8, P77504; SEQ ID NO: 219), yddA (UniProt P31826; SEQ ID NO: 220), yojI (UniProt P33941; SEQ ID NO: 221), and yhhJ (UniProt P0AGH1; SEQ ID NO: 222).

[0064] In another aspect, the invention provides an engineered cell expressing one or more endogenous gene encoding an ABC transporter permease or ABC transporter ATP-binding protein that is capable of affecting cannabinoid (or derivatives thereof) efflux from the cell, wherein the native promoter of at least one of the one or more endogenous genes is replaced with a constitutive promoter that increases expression of the genes relative to a the expression in a control cell with the native promoter. Optionally, the constitutive promoter is heterologous. One or more of the endogenous genes may be selected from a ybhS gene, a ybhF gene, a ybhR gene, a ybhG gene, a ydhC gene, a blc gene, a pur8 gene, a mlaD gene, a mlaE gene, and a mlaF gene. In some embodiments, the cannabinoid is CBGA, THCV, THCVA, CBDV, CBDVA, CBN, CBNA, CBD, CBDA, CBC, CBCA, CBGV, CBGVA, CBG, CBCV, CBCVA, THC, THCA, analogs, or derivatives thereof, or combinations thereof.

[0065] In another aspect, the invention provides an engineered cell, wherein the cell is engineered for a modification that causes a disruption or downregulation in the expression of an ybiH gene. The ybiH gene may encode a protein having an amino acid sequence that is identical or substantially identical to SEQ ID NO: 117. The disruption or downregulation in the expression of the ybiH gene may cause the cell to overexpress at least one endogenous genes encoding an ABC transporter permease or ABC transporter ATP-binding protein that is capable of effecting cannabinoid (or derivatives thereof)efflux from the cell relative to the expression of the at least one endogenous genes expressed by a control cell substantially identical to the engineered cell with the exception that the control cell is not engineered to cause a disruption or downregulation in the expression of the ybiH gene. The at least one endogenous gene encoding an ABC transporter permease may be selected from the group consisting of a ybhS gene, a ybhR gene, and a ybhG gene. The endogenous gene encoding the ABC transporter ATP-binding protein may be a ybhF gene. In some embodiments, the cell effluxes more CBGA, THCV, THCVA, CBDV, CBDVA, CBN, CBNA, CBD, CBDA, CBC, CBCA, CBGV, CBGVA, CBG, CBCV, CBCVA, THC, THCA, analogs, or derivatives thereof, or combinations thereof than is effluxed by a control cell. In some embodiments, the cell effluxes more CBGA.

[0066] In some embodiments of any of the foregoing aspects, the exogenous nucleic acid sequence is a heterologous nucleic acid sequence.

[0067] In some embodiments of any of the foregoing aspects, the engineered cell produces more cannabigerol (CBGA) than is produced by a control cell substantially identical to the engineered cell. In some embodiments, the engineered cell produces CBGA, THCV, THCVA, CBDV, CBDVA, CBN, CBNA, CBD, CBDA, CBC, CBCA, CBGV, CBGVA, CBG, CBCV, CBCVA, THC, THCA, analogs, or derivatives thereof, or combinations thereof.

[0068] In some embodiments of any of the foregoing aspects, the cell is selected from the group consisting of bacteria, fungi, yeast, cyanobacteria, and algae, including, for example, E. coli.

[0069] In another aspect, the invention provides a method for making more malonyl-CoA available as a metabolic intermediate in a microbial production pathway of the product, the method comprising

[0070] (a) combining one or more carbon sources, a cell of any one of the foregoing aspects or embodiments, and a microorganism cell culture media to produce a cell culture; and

[0071] (b) incubating the cell culture produced in step (a) under conditions that produce the product.

[0072] In some embodiments, the product is olivetolic acid or analogs thereof, a cannabinoid, and/or derivatives of a cannabinoid. In some embodiments, the cannabinoid is CBGA, THCV, THCVA, CBDV, CBDVA, CBN, CBNA, CBD, CBDA, CBC, CBCA, CBGV, CBGVA, CBG, CBCV, CBCVA, THC, THCA, analogs, or derivatives thereof, or combinations thereof.

[0073] In some embodiments, the method further comprises a step of isolating or purifying the cannabinoid from other material. The step of isolating or purifying may comprise one or more of liquid-liquid extraction, pervaporation, evaporation, filtration, membrane filtration (including reverse osmosis, nanofiltration, ultrafiltration, and microfiltration), membrane filtration with diafiltration, membrane separation, reverse osmosis, electrodialysis, distillation, extractive distillation, reactive distillation, azeotropic distillation, crystallization and recrystallization, centrifugation, extractive filtration, ion exchange chromatography, size exclusion chromatography, adsorption chromatography, carbon adsorption, hydrogenation, solvent extraction, and ultrafiltration.

[0074] In another aspect, the invention provides a cannabinoid produced by the method of any one of the foregoing aspects or embodiments.

[0075] In another aspect, the invention provides a composition comprising a cannabinoid, its analogs or derivatives and a cell culture media or component thereof, wherein the cannabinoid, its analogs or derivatives is present at a concentration of at least 5% (w/v). The CBGA may be present at a concentration of 5%-90% (w/v), including 5%-20% (w/v). In some embodiments, the cannabinoid is CBGA, THCV, THCVA, CBDV, CBDVA, CBN, CBNA, CBD, CBDA, CBC, CBCA, CBGV, CBGVA, CBG, CBCV, CBCVA, THC, THCA, analogs, or derivatives thereof, or combinations thereof.

[0076] In another aspect, the invention provides a method for making a composition comprising a cannabinoid (or derivatives thereof), the method comprising:

[0077] (a) producing a cannabinoid (or derivatives thereof) according to the method of any one of the foregoing aspects or embodiments;

[0078] (b) separating the cells from the cell culture to produce a substantially cell-free culture media; and

[0079] (c) producing a cannabinoid (or derivatives thereof) concentrate from the culture media, wherein the cannabinoid is present in a higher concentration in the cannabinoid concentrate than in the cell-free culture media.

[0080] Optionally, the cannabinoid concentrate comprises a cannabinoid concentration of at least 5%, 10%, 15%, 20%, 25%, 30%, 35%, 40%, 45%, 50%, 55%, 60%, 65%, 70%, 75%, 80%, 85%, 90% (w/v).

[0081] In another aspect, the invention provides a method for making a composition comprising cannabinoid (or derivatives thereof), the method comprising:

[0082] (a) producing cannabinoid (or derivatives thereof) according to the method of any one of the foregoing aspects or embodiments;

[0083] (b) separating the cells from the cell culture to produce a substantially cell-free culture media; and

[0084] (c) producing cannabinoid (or derivatives thereof) concentrate from the culture media, wherein the cannabinoid (or derivatives thereof) is present in a higher concentration in the cannabinoid (or derivatives thereof) concentrate than in the cell-free culture media.

[0085] Optionally, the cannabinoid (or derivatives thereof) concentrate comprises cannabinoid (or derivatives thereof) concentration of at least 10% (w/v). In some embodiments, the cannabinoid (or derivatives thereof) concentrate comprises cannabinoid (or derivatives thereof) concentration of at least 5% (w/v).

[0086] In some embodiments, the cannabinoid is present in a concentration of at least 5%, 10%, 15%, 20%, 25%, 30%, 35%, 40%, 45%, 50%, or more on a weight:volume (w/v) basis or about 5-50%, 5-40%, 5-30%, 5-20%, 10-50%, 10-40%, 10-30%, or 10-20%.

[0087] In some embodiments, the molar ratio of cannabinoid to its analogs or derivatives is about 100:0, 99.9:0.1, 99.5:0.5, 99:1, 98:2, 97.5:2.5, 97:3, 95:5, 90:10, 85:15, 80:20, 75:25, 70:30, 65:35, 60:40, 55:45, 50:50, 45:55, 40:60, 35:65, 30:70, 25:75, 20:80, 15:85, 10:90, 5:95, 2.5:97.5, 2:98, 1:99, 0.5:95, 0.1:99.9, 0.01:99.99.

[0088] In some embodiments, the composition comprising cannabinoids, analogs, or derivatives thereof is a liquid, an engineered cell fermentation broth or cell culture medium, a cell free fermentation broth, or an engineered cell lysate. In some embodiments, the engineered cell, engineered cell extract, or engineered cell culture medium comprises cannabinoid (or derivatives thereof) at a concentration of no more than about 90% to about 0.0001%, no more than about 20% to about 0.001%, no more than about 10% to about 0.01% by weight of the engineered cell, engineered cell extract, or engineered cell culture medium.

[0089] In some embodiments, the cannabinoids including cannabinoids derivatives thereof are essentially free of pesticides, heavy metals, other plant derived materials, or antibiotics. In some embodiments, the cannabinoids, and/or derivatives or analogs thereof are at least about 25%, 30%, 35%, 40%, 45%, 50%, 55%, 60%, 65%, 70%, 75%, 80%, 85%, 90%, 95%, 96%, 97%, 98%, 99%, 99.5%, 99.8% or more pure.

[0090] As used herein, the term “cannabinoid” refers to a class of compounds that include both naturally occurring and non-naturally occurring compounds, characterized and uncharacterized, thus the term “cannabinoid” as used herein encompasses cannabinoid derivatives—i.e., derivatives of naturally-occurring or known cannabinoids. Exemplary cannabinoids include cannabidiol (CBD), cannabidiolic acid (CBDA), cannabigerol (CBG), cannabigerolic acid (CBGA), cannabichromene (CBC), cannabichromenic acid (CBCA), Δ⁹-tetrahydrocannabinol 25 (THC), Δ⁹-tetrahydrocannabinoic acid (Δ⁹-THCA), cannabinol (CBN), and cannabinolic acid (CBNA). Additional cannabinoids are provided in the disclosure hereinabove. Also included are derivatives of known, naturally-occurring cannabinoids and cannabinoids disclosed herein, which can be any derivatives, and include but are not limited to derivatives having alkyl chain lengths that are longer or shorter than C6. In some embodiments, cannabinoid derivatives include non-naturally occurring cannabinoids.

[0091] Cannabinoids may include, but are not limited to, cannabichromene (CBC) type (e.g. cannabichromenic acid), cannabigerol (CBG) type (e.g. cannabigerolic acid), cannabidiol (CBD) type (e.g. cannabidiolic acid), Δ⁹-trans-tetrahydrocannabinol (Δ⁹-THC) type (e.g. Δ⁹-tetrahydrocannabinolic acid), Δ⁸-trans-tetrahydrocannabinol (Δ⁸-THC) type, cannabicyclol (CBL) type, cannabielsoin (CBE) type, cannabinol (CBN) type, cannabinodiol (CBND) type, cannabitriol (CBT) type, cannabigerolic acid (CBGA), cannabigerolic acid monomethylether (CBGAM), cannabigerol (CBG), cannabigerol monomethylether (CBGM), cannabigerovarinic acid (CBGVA), cannabigerovarin (CBGV), cannabichromenic acid (CBCA), cannabichromene (CBC), cannabichromevarinic acid (CBCVA), cannabichromevarin (CBCV), cannabidiolic acid (CBDA), cannabidiol (CBD), cannabidiol monomethylether (CBDM), cannabidiol-C4 (CBD-C4), cannabidivarinic acid (CBDVA), cannabidivarin (CBDV), cannabidiorcol (CBD-C1), Δ⁹-tetrahydrocannabinolic acid A (THCA-A), Δ⁹-tetrahydrocannabinolic acid B (THCA-B), Δ⁹-tetrahydrocannabinol (THC), Δ⁹-tetrahydrocannabinolic acid-C4 (THCA-C4), Δ⁹-tetrahydrocannabinol-C4 (THC-C4), Δ⁹-tetrahydrocannabivarinic acid (THCVA), Δ⁹-tetrahydrocannabivarin (THCV), Δ⁹-tetrahydrocannabiorcolic acid (THCA-C1), Δ⁹-tetrahydrocannabiorcol (THC-C1), iso-tetrahydrocannabivarin, Δ8-tetrahydrocannabinolic acid (Δ⁸-THCA), Δ⁸-tetrahydrocannabinol (Δ⁸-THC), cannabicyclolic acid (CBLA), cannabicyclol (CBL), cannabicyclovarin (CBLV), cannabielsoic acid A (CBEA-A), cannabielsoic acid B (CBEA-B), cannabielsoin (CBE), cannabielsoinic acid, cannabicitranic acid, cannabinolic acid (CBNA), cannabinol (CBN), cannabinol methylether (CBNM), cannabinol-C4, (CBN-C4), cannabivarin (CBV), cannabinol-C2 (CNB-C2), cannabiorcol (CBN-C1), cannabinodiol (CBND), cannabinodivarin (CBVD), cannabitriol (CBT), 10-ethyoxy-9-hydroxy-delta-6a-tetrahydrocannabinol, 8,9-dihydroxyl-delta-6a-tetrahydrocannabinol, cannabitriolvarin (CBTVE), dehydrocannabifuran (DCBF), cannabifuran (CBF), cannabichromanon (CBCN), cannabicitran (CBT), 10-oxo-delta-6a-tetrahydrocannabinol (OTHC), Δ⁹-cis-tetrahydrocannabinol (cis-THC), 3,4,5,6-tetrahydro-7-hydroxy-alpha-alpha-2-trimethyl-9-n-propyl-2,6-methano-2H-1-benzoxocin-5-methanol (OH-iso-HHCV), cannabiripsol (CBR), and trihydroxy-Δ⁹-tetrahydrocannabinol (triOH-THC).

[0092] Abbreviated terms may be used to designate cannabinoids and related molecules. For example, the term “CBGA” refers to cannabigerolic acid, “OA” refers to olivetolic acid; “CBG” refers to cannabigerol; “CBDA” refers to cannabidiolic acid; “CBD” refers to cannabidiol; “THC” refers to Δ9-tetrahydrocannabinol (Δ⁹-THC); “Δ⁸-THC” refers to Δ⁸-tetrahydrocannabinol; “THCA” refers to Δ⁹-tetrahydrocannabinolic acid (Δ⁹-THCA); “Δ⁸-THCA” refers to Δ⁸-tetrahydrocannabinolic acid; “CBCA” refers to cannabichromenic acid; “CBC” refers to cannabichromene; “CBN” refers to cannabinol; “CBDN” refers to cannabinodiol; “CBNA” refers to cannabinolic acid; “CBV” refers to cannabivarin; “CBVA” refers to cannabivarinic acid; “THCV” refers to Δ⁹-tetrahydrocannabivarin (Δ⁹-THCV); “Δ⁸-THCV” refers to Δ⁸-tetrahydrocannabivarin; “THCVA” refers to Δ⁹-tetrahydrocannabivarinic acid (Δ⁹-THCV); “Δ⁸-THCVA” refers to Δ⁸-tetrahydrocannabivarinic acid; “CBGV” refers to cannabigerovarin; “CBGVA” refers to cannabigerovarinic acid; “CBCV” refers to cannabichromevarin; “CBCVA” refers to cannabichromevarinic acid; “CBDV” refers to cannabidivarin; and “CBDVA” refers to cannabidivarinic acid.

[0093] The following description of the invention extensively refers to the synthesis of CBGA. It is understood that CBGA and its analogs and derivatives may be produced by altering the metabolic precursors in a manner that predictably alters the final product. Such alterations include, for example, altering the aliphatic chain length in fatty acid-containing precursors.

[0094] By “a protein having 3-oxoacyl-[acyl-carrier-protein] synthase activity” is meant a protein having the enzymatic activity of EC. 2.3.1.179 (e.g., encoded by FabF), EC 2.3.1.41 (e.g., encoded by FabB), and EC 2.3.1.80 (e.g., encoded by FabH).

[0095] By “protein having enoyl-[acyl-carrier-protein] reductase activity” is meant a protein having the enzymatic activity of EC 1.3.1.9 (e.g., encoded by FabI).

### BRIEF DESCRIPTION OF THE DRAWINGS

[0096] FIG. 1 is a schematic diagram illustrating the CBGA synthetic and related metabolic pathways.

[0097] FIG. 2 is a series of bar graphs showing the effect of the addition of OLA and prenol on the expression of various CBGA transporters.

[0098] FIG. 3A is a series of line graphs showing the temporal expression of mlaD, mlaE, and mlaF following the addition of OLA and prenol to the culture medium.

[0099] FIG. 3B is a series of line graphs characterizing the bacterial culture following the addition of OLA and prenol to the culture medium.

[0100] FIG. 4 shows the CGBA production of E. coli strains engineered with different geranyl diphosphate synthase genes.

[0101] FIG. 5 is a schematic diagram illustrating exemplary mevalonate pathway (MVA) and non-mevalonate pathway (MEP). The abbreviations are DXS: 1-Deoxy-D-xylulose 5-phosphate synthase; DXR: 1-Deoxy-D-xylulose 5-phosphate reductoisomerase; CMS: 2-C-methyl-D-erythritol 4-phosphate cytidylyltransferase; CMK: 4-diphosphocytidyl-2-C-methyl-D-erythritol kinase; MECS: 2-C-methyl-D-erythritol 2,4-cyclodiphosphate synthase; HDS: 4-Hydroxy-3-methyl-but-2-enyl pyrophosphate synthase; HDR: 4-Hydroxy-3-methyl-but-2-enyl pyrophosphate reductase; DMAP: Dimethylallyl pyrophosphate; AACT: acetoacetyl-CoA thiolase; HMGS: HMG-CoA synthase; HMGR: HMG-CoA reductase; MVK: mevalonate-3-kinase; PMK: Phosphomevalonate kinase; MVD: mevalonate-5-pyrophosphate decarboxylase; and IDI: isopentenyl pyrophosphate isomerase.

[0102] FIG. 6 is a schematic diagram illustrating a non-MEP, non-MVA pathway resulting in GPP synthesis from prenol.

[0103] FIG. 7 is a schematic diagram illustrating a non-MVA, non-MEP pathway resulting in GPP synthesis from isoprenol.

[0104] FIG. 8A is bar graph showing the effect of deletion of E. coli fadR gene on the production of OLA in an E. coli strain comprising OLS, OAC, prenyltransferase, thiM, fadD, Mucor circinelloides acc, deletion of E. coli fadE and fadR genes. FIG. 8B is a bar graph showing the effect of E. coli fadE gene on the production of OLA in an E. coli strain comprising fadD, and E. coli accABCD under an IPTG-inducible T7 promoter, OLS, OAC, and a deletion of fadE gene.

[0105] FIG. 9 is a bar graph showing the effect of deletion of E. coli nudB gene on the production of CBGA in an in an E. coli strain comprising OLS, OAC, GPP pathway genes (thiM, IPK, idi, and idsA), and deletion of nudB gene.

[0106] FIG. 10 is a bar graph showing the dephosphorylation of IPP to 3-methyl-3-butanol by various Nudix proteins.

[0107] FIG. 11 is a bar graph showing the effect of downregulation of fabD on the total OLA pathway flux in E. coli strains comprising ACC, fabD, OLS, and OAC. Strain 13883 is the parental control with wild type fabD and the various other strains having genotype as the parental strain 13883 with the exception that the strains have the RBS sequence modified to lower its protein expression (FabD60, FabD24, FabD41, FabD46, FabD22, FabD12, FabD28, FabD30, FabD5, FabD1, FabD23, FabD13).

[0108] FIG. 12 is a graph showing the proteomic analysis of effect of FabD ribosomal binding site (RBS) variation on the expression of FabD.

### DETAILED DESCRIPTION OF THE DISCLOSURE

[0109] The present invention provides engineered cells that make available more malonyl-CoA, one or more fatty acyl-CoAs, geranyldiphosphate (GPP), and/or produce one or more cannabinoids (or its derivatives), and methods for using and culturing the same. The engineered cells may have one or multiple modifications, including, without limitation, the downregulation, disruption, or deletion of one or more endogenous genes, the upregulation of one or more endogenous genes, and the introduction of one or more exogenous/heterologous genes, and combinations thereof.

[0110] The term “non-naturally occurring”, when used in reference to an organism (e.g., microbial) or host cell is intended to mean that the organism or host cell has at least one genetic alteration not normally found in a naturally occurring organism of the referenced species that is the result of human intervention. Naturally-occurring organisms can be referred to as “wild-type” such as wild type strains of the referenced species.

[0111] A genetic alteration that makes an organism or cell non-natural can include, for example, modifications introducing expressible nucleic acids encoding metabolic polypeptides, other nucleic acid additions, nucleic acid deletions and/or other functional disruption of the organism's genetic material. Such modifications include, for example, coding regions and functional fragments thereof, for heterologous, homologous or both heterologous and homologous polypeptides for the referenced species. Additional modifications include, for example, non-coding regulatory regions in which the modifications alter expression of a gene or operon.

[0112] A host cell, organism, or microorganism engineered to express or overexpress a gene, a nucleic acid, nucleic acid sequence, or nucleic acid molecule, or to overexpress an enzyme or polypeptide has been genetically engineered through recombinant DNA technology to include a gene or nucleic acid sequence that it does not naturally include that encodes the enzyme or polypeptide or to express an endogenous gene at a level that exceeds its level of expression in a non-altered cell. As non-limiting examples, a host cell, organism, or microorganism engineered to express or overexpress a gene, a nucleic acid, nucleic acid sequence, or nucleic acid molecule, or to overexpress an enzyme or polypeptide can have any modifications that affect a coding sequence of a gene, the position of a gene on a chromosome or episome, or regulatory elements associated with a gene. Overexpression of a gene can also be by increasing the copy number of a gene in the cell or organism. Similarly, a host cell, organism, or microorganism engineered to under-express (or to have reduced expression of) a gene, nucleic acid, nucleic acid sequence, or nucleic acid molecule, or to under-express an enzyme or polypeptide can have any modifications that affect a coding sequence of a gene, the position of a gene on a chromosome or episome, or regulatory elements associated with a gene. Specifically included are gene disruptions, which include any insertions, deletions, or sequence mutations into or of the gene or a portion of the gene that affect its expression or the activity of the encoded polypeptide. Gene disruptions include “knockout” mutations that eliminate expression of the gene. Modifications to under-express a gene also include modifications to regulatory regions of the gene that can reduce its expression

[0113] The term “exogenous” is intended to mean that the referenced molecule or the referenced activity is introduced into the host microbial organism. The molecule can be introduced, for example, by introduction of an encoding nucleic acid into the host genetic material such as by integration into a host chromosome or as non-chromosomal genetic material that may be introduced on a vehicle such as a plasmid. Therefore, the term as it is used in reference to expression of an encoding nucleic acid refers to introduction of the encoding nucleic acid in an expressible form into the microbial organism. When used in reference to a biosynthetic activity, the term refers to an activity that is introduced into the host reference organism. The source can be, for example, a homologous or heterologous encoding nucleic acid that expresses the referenced activity following introduction into the host microbial organism. Therefore, the term “endogenous” refers to a referenced molecule or activity that is naturally present in the host. Similarly, the term when used in reference to expression of an encoding nucleic acid refers to expression of an encoding nucleic acid contained within the microbial organism. The term “heterologous” refers to a molecule or activity derived from a source other than the referenced species whereas “homologous” refers to a molecule or activity derived from the host microbial 5 organism/species. Accordingly, exogenous expression of an encoding nucleic acid can utilize either or both of a heterologous or homologous encoding nucleic acid.

[0114] When used to refer to a genetic regulatory element, such as a promoter, operably linked to a gene, the term “homologous” refers to a regulatory element that is naturally operably linked to the referenced gene. In contrast, a “heterologous” regulatory element is not naturally found operably linked to the referenced gene, regardless of whether the regulatory element is naturally found in the host species.

[0115] It is understood that when more than one exogenous nucleic acid is included in a microbial organism, the more than one exogenous nucleic acid(s) refers to the referenced encoding nucleic acid or biosynthetic activity, as discussed above. It is further understood, as disclosed herein, that more than one exogenous nucleic acid(s) can be introduced into the host microbial organism on separate nucleic acid molecules, on polycistronic nucleic acid molecules, or a combination thereof, and still be considered as more than one exogenous nucleic acid/nucleic acid sequence. For example, as disclosed herein a microbial organism can be engineered to express at least two, three, four, five, six, seven, eight, nine, ten or more exogenous nucleic acids encoding a desired pathway enzyme or protein. In the case where two or more exogenous nucleic acids encoding a desired activity are introduced into a host microbial organism, it is understood that the two or more exogenous nucleic acids can be introduced as a single nucleic acid, for example, on a single plasmid, on separate plasmids, can be integrated into the host chromosome at a single site or multiple sites, and still be considered as two or more exogenous nucleic acids. Similarly, it is understood that more than two exogenous nucleic acids can be introduced into a host organism in any desired combination, for example, on a single plasmid, on separate plasmids, can be integrated into the host chromosome at a single site or multiple sites, and still be considered as two or more exogenous nucleic acids, for example three exogenous nucleic acids. Thus, the number of referenced exogenous nucleic acids or biosynthetic activities refers to the number of encoding nucleic acids or the number of biosynthetic activities, not the number of separate nucleic acids introduced into the host organism.

[0116] By “exogenous nucleic acid sequence” is meant a nucleic acid that is not naturally-occurring within the cell (e.g., a host cell) or organism. Exogenous nucleic acid sequence may be derived from or identical to a naturally-occurring nucleic acid sequence or it may be a heterologous nucleic acid sequence. For example, a duplication of a naturally-occurring gene is considered to be an exogenous nucleic acid sequence. In some embodiments, the exogenous nucleic acid sequence may be a heterologous nucleic acid sequence.

[0117] Genes or nucleic acid sequences can be introduced stably or transiently into a host cell using techniques well known in the art including, but not limited to, conjugation, electroporation, chemical transformation, transduction, transfection, and ultrasound transformation. Optionally, for exogenous expression in E. coli or other prokaryotic cells, some nucleic acid sequences in the genes or cDNAs of eukaryotic nucleic acids can encode targeting signals such as an N-terminal mitochondrial or other targeting signal, which can be removed before transformation into prokaryotic host cells, if desired. For example, removal of a mitochondrial leader sequence led to increased expression in E. coli (Hoffmeister et al., J. Biol. Chem. 280:4329-4338 (2005)). For exogenous expression in yeast or other eukaryotic cells, genes can be expressed in the cytosol without the addition of leader sequence, or can be targeted to mitochondrion or other organelles, or targeted for secretion, by the addition of a suitable targeting sequence such as a mitochondrial targeting or secretion signal suitable for the host cells. Thus, it is understood that appropriate modifications to a nucleic acid sequence to remove or include a targeting sequence can be incorporated into an exogenous nucleic acid sequence to impart desirable properties. Furthermore, genes can be subjected to codon optimization with techniques well known in the art to achieve optimized expression of the proteins.

[0118] The percent identity (% identity) between two sequences is determined when sequences are aligned for maximum homology, and not including gaps or truncations as set forth in the BLAST parameters. Exemplary parameters for determining relatedness of two or more amino acid sequences using the BLAST algorithm, for example, can be as provided in BLASTP using the following parameters: Matrix: 0 BLOSUM62; gap open: 11; gap extension: 1; x_dropoff: 50; expect: 10.0; wordsize: 3; filter: on. Nucleic acid sequence alignments can be performed using BLASTN and the following parameters: Match: 1; mismatch: −2; gap open: 5; gap extension: 2; x_dropoff: 50; expect: 10.0; wordsize: 11; filter: off. Those skilled in the art will know what modifications can be made to the above parameters to either increase or decrease the stringency of the comparison, for example, for determining the relatedness of two or more sequences. Additional sequences added to a polypeptide sequence, such as but not limited to immunodetection tags, purification tags, localization sequences (presence or absence), etc., do not affect the % identity.

[0119] Algorithms well known to those skilled in the art, such as Align, BLAST, Clustal W and others compare and determine a raw sequence similarity or identity, and also determine the presence or significance of gaps in the sequence which can be assigned a weight or score. Such algorithms also are known in the art and are similarly applicable for determining nucleotide or amino acid sequence similarity or identity, and can be useful in identifying orthologs of genes of interest. Parameters for sufficient similarity to determine relatedness are computed based on well-known methods for calculating statistical similarity, or the chance of finding a similar match in a random polypeptide, and the significance of the match determined. A computer comparison of two or more sequences can, if desired, also be optimized visually by those skilled in the art. Related gene products or proteins can be expected to have a high similarity, for example, 45% to 100% sequence identity. Proteins that are unrelated can have an identity which is essentially the same as would be expected to occur by chance if a database of sufficient size is scanned (about 5%).

[0120] For example, alignment can be performed using the Needleman-Wunsch algorithm (Needleman, S. & Wunsch, C. A general method applicable to the search for similarities in the amino acid sequence of two proteins J. Mol. Biol, 1970, 48, 443-453) implemented through the BALIGN tool (http://balign.sourceforge.net/). Default parameters are used for the alignment and BLOSUM62 was used as the scoring matrix. In some cases, it can be useful to use the Basic Local Alignment Search Tool (BLAST) algorithm to understand the sequence identity between an amino acid motif in a template sequence and a target sequence. Therefore, in preferred modes of practice, BLAST is used to identify or understand the identity of a shorter stretch of amino acids (e.g. a sequence motif) between a template and a target protein. BLAST finds similar sequences using a heuristic method that approximates the Smith-Waterman algorithm by locating short matches between the two sequences. The (BLAST) algorithm can identify library sequences that resemble the query sequence above a certain threshold.

[0121] A homolog is a gene or genes that are related by vertical descent and are responsible for substantially the same or identical functions in different organisms. Genes are related by vertical descent when, for example, they share sequence similarity of sufficient amount to indicate they are homologous or related by evolution from a common ancestor. Genes that are orthologous can encode proteins with sequence similarity of about 45% to 100% amino acid sequence identity, and more preferably about 60% to 100% amino acid sequence identity. Genes can also be considered orthologs if they share three-dimensional structure but not necessarily sequence similarity, of a sufficient amount to indicate that they have evolved from a common ancestor to the extent that the primary sequence similarity is not identifiable. Paralogs are genes related by duplication within a genome, and can evolve new functions, even if these are related to the original one.

[0122] An amino acid position (or simply, amino acid) “corresponding to” an amino acid position in another polypeptide sequence is the position that is aligned with the referenced amino acid position when the polypeptides are aligned for maximum homology, for example, as determined by BLAST which allows for gaps in sequence homology within protein sequences to align related sequences and domains. Alternatively, in some instances, when polypeptide sequences are aligned for maximum homology, a corresponding amino acid may be the nearest amino acid to the identified amino acid that is within the same amino acid biochemical grouping—i.e., the nearest acidic amino acid, the nearest basic amino acid, the nearest aromatic amino acid, etc. to the identified amino acid.

[0123] By “substantially identical,” with reference to a nucleic acid sequence (e.g., a gene, RNA, or cDNA) or amino acid sequence (e.g., a protein or polypeptide) is meant one that has at least 50%, at least 55%, at least 60%, at least 65%, at least 70%, at least 75%, at least 80%, at least 85%, at least 90%, at least 95%, at least 96%, at least 97% at least 98%, or at least 99% nucleotide or amino acid identity, respectively, to a reference sequence.

[0124] In some embodiments, the acyl-CoA substrate has the following structure:

[chemical structure]

[0125] wherein R is a branched or linear alkyl side chain optionally comprising one or more functional and/or reactive groups as disclosed herein (i.e., an acyl-CoA compound derivative). In some embodiments, functional groups may include, but are not limited to, azido, halo (e.g., chloride, bromide, iodide, fluorine), alkynyl, alkenyl, methoxy, alkoxy, acetyl, amino, carboxyl, carbonyl, oxo, ester, hydroxyl, thio, cyano, aryl, heteroaryl, cycloalkyl, cycloalkenyl, cycloalkylalkenyl, cycloalkylalkynyl, cycloalkenylalkyl, cycloalkenylalkenyl, cycloalkenylalkynyl, heterocyclylalkenyl, heterocyclylalkynyl, heteroarylalkenyl, heteroarylalkynyl, arylalkenyl, arylalkynyl, heterocyclyl, spirocyclyl, heterospirocyclyl, thioalkyl, sulfone, sulfonyl, sulfoxide, amido, alkylamino, dialkylamino, acylamino, alkylarylamino, diarylamino, N-oxide, imide, enamine, imine, oxime, hydrazone, nitrile, aralkyl, cycloalkylalkyl, haloalkyl, heterocyclylalkyl, heteroarylalkyl, nitro, thioxo, and the like.

[0126] In some embodiments, the reactive groups may include, but are not necessarily limited to, azide, carboxyl, carbonyl, amine, (e.g., alkyl amine (e.g., lower alkyl amine), aryl amine), halide, ester (e.g., alkyl ester (e.g., lower alkyl ester, benzyl ester), aryl ester, substituted aryl ester), cyano, thioester, thioether, sulfonyl halide, alcohol, thiol, succinimidyl ester, isothiocyanate, iodoacetamide, maleimide, hydrazine, alkynyl, alkenyl, and the like. A reactive group may facilitate covalent attachment of a molecule of interest. Functional and reactive groups may be optionally substituted with one or more additional functional or reactive groups.

[0127] In some embodiments, the acyl-CoA substrate is selected from the group consisting of acetyl-CoA, propionyl-CoA, butyryl-CoA, valeryl-CoA, hexanoyl-CoA, heptanoyl-CoA, octanoyl-CoA, nonanoyl-CoA, and decanoyl-CoA. In some embodiments, the acyl chain may be C₂-C₆, C₂-C₈, C₂-C₁₀, C₂-C₂₀, C₆-C₁₀, C₆-C₂₀, or C₁₀-C₂₀.

[0128] CBGA Synthetic Pathway

[0129] FIG. 1 is a schematic diagram illustrating the relevant synthetic pathways that may be engineered to improve the production of CBGA and its analogs and precursors. In relevant part, CBGA (or its analog) is produced from GPP and olivetolic acid (OA) (or its analog) by prenyltransferase. Cannabinoids (e.g., CBGA) or derivatives may be then secreted by the cell via a variety of known and putative cannabinoid transporters including ybhS, yhF, ybhR, and ybhG. The present inventions are based on engineered cells that have higher levels of available GPP and OA (and OA analogs or derivatives) for increased production of cannabinoids (e.g., CBGA) or derivatives and/or increased expression of cannabinoid transporters to effect increased efflux of cannabinoids (e.g., CBGA) or derivatives from the cell.

[0130] (A) Olivetolic Acid Production

[0131] As illustrated in FIG. 1, intracellular acyl carboxylic acid (e.g., hexanoate) is converted to acyl-CoA (e.g., Hex-CoA) by a fatty acyl-CoA ligase (e.g., fadD). One molecule of Hex-CoA (or other acyl-CoA) is combined with three molecules of malonyl-CoA (Mal-CoA) by olivetol synthase (OLS, also called 3,5,7-trioxododecanoyl-CoA synthase and tetraketide synthase, EC 2.3.1.206) or its variants to form a tetraketide (e.g., 3,5,7-trioxododecanoyl-CoA or 3,5,7-trioxododecanoic acid) which is subsequently converted to OA (or analogs thereof) by olivetolic acid cyclase (OAC, EC 4.4.1.26) or its variants. Although these metabolic pathways are illustrated with reference to certain precursors and intermediates, it is understood that analogs may be substituted in essentially the same reactions. For example, it is understood that hexanoate analogs including other carboxylic acids may be used in place of hexanoate. Suitable substitutions include, for example and without limitation, acetic acid, propionic acid, butyric acid, valeric acid (pentanoic acid), heptanoic acid, caprylic acid (octanoic acid), and generally any C₂-C₂₀ carboxylic acid. Similarly, it is understood that Hex-CoA is exemplary of the class of acyl-CoAs described above.

[0132] It is therefore desirable to increase the cell's production and availability of the precursors Mal-CoA and/or Hex-CoA (or other acyl-CoA) which often are limiting in the production of OA (or OA analogs). This may be achieved in two ways: by increasing the precursor production and by limiting precursor metabolism through competing (non-OA-producing) pathways. Engineered cells of the present invention comprise non-naturally-occurring modification that take advantage of either or both of these strategies in order to increase the production of OA (or OA analogs) and ultimately CBGA (or its associated analog). Methods for each of these is described in detail below.

[0133] It also is desirable to increase the production of OA (or OA analogs) directly, particularly in engineered cells in which the OA precursors (or OA precursor analogs), Mal-CoA and/or acyl-CoA, are produced in excess. Thus, in some embodiments, the cells are engineered to express an exogenous (e.g., a heterologous) or over-express an exogenous or endogenous OLS and/or OAC. In some embodiments, the OLS and OAC are non-naturally occurring OLS and OAC, respectively. In some embodiments, the OLS and/or OAC comprise one or more amino acid substitutions. In some embodiments, one or more amino acid substitutions of OLS and/or OAC increases the activity of the enzyme as compared to their naturally occurring counterpart.

[0134] Non-natural OAC variants are also described in commonly assigned International Application No. PCT/US2020/036310, filed Jun. 5, 2020 (Noble, et al.), the disclosure of which is incorporated herein by reference.

[0135] Olivetol synthase (OLS) belongs to plant type III polyketide synthases (PKS) which are a group of condensing enzymes that catalyze the initial key reactions in the biosynthesis of a myriad of secondary metabolites. All the plant type III polyketide synthases that have been characterized are homodimeric proteins. Each monomer of the dimeric protein contains its own active site and catalyzes the sequential condensation of starter CoA molecule and one acyl unit from malonyl-CoA, independently. Each condensation step is associated with one decarboxylation step. Olivetol synthases are classified as EC:2.3.1.206 under the Enzyme Commision nomenclature. Olivetol synthases have structural similarities with plant type III PKS enzymes. The OLS enzyme comprises conserved Cys157-His 297-Asn 330 catalytic triad, and the ‘gatekeeper’ Phe 208 corresponding to the amino acid positions of SEQ ID NO: 122. These amino acid residues are conserved for all other OLS homologs corresponding to SEQ ID Nos: 123-131. In some embodiments, the OLS has amino acid sequence that is substantially identical to any one of SEQ ID NOs: 122-131. In some embodiments, the amino acid sequence of the non-natural olivetol synthase has one or more amino acid variations at position(s) selected from the group consisting of: 125, 126, 185, 187, 190, 204, 209, 210, 211, 249, 250, 257, 259, 331, and 332 corresponding to the amino acid sequence of SEQ ID NO:122.

[0136] Although the positions recited herein are with reference to the corresponding amino acid sequence of SEQ ID NO:122, it is expressly contemplated that the amino acid sequence of the non-natural olivetol synthase can have one or more amino acid variations at equivalent positions (variant positions) corresponding to the homologs of SEQ ID NO: 122, e.g., SEQ ID NOs: 123-131. SEQ ID NOs 122-131 align very well and therefore identification of variant positions in any of SEQ ID NOs: 123-131 that correspond to variant positions in SEQ ID NO:122 can readily be understood.

[0137] In some embodiments, the amino acid substitutions designed to increase OA production by OLS are shown below. The amino acid positions of OLS corresponds to SEQ ID NO: 122. It is expressly contemplated that the amino acid sequence of the non-natural OLS can have one or more amino acid variations at equivalent positions corresponding to the homologs of SEQ ID NO: 122, e.g., SEQ ID Nos 123-131 (Table 1).

TABLE 1
Amino Acid Substitutions

| Position | Substitution |
|---|---|
| A125 | G, S, T, C, Y, H, N, Q, D, E, K, R |
| S126 | G, A |
| D185 | G, A, S, P, C, T, N |
| M187 | G, A, S, P, C, T, D, N, E, Q, H, V, L, I, K, R |
| L190 | G, A, S, P, C, T, D, N, E, Q, H, V, M, I, K, R |
| G204 | A, C, P, V, L, I, M, F, W |
| G209 | A, C, P, V |
| D210 | A, C, P, V |
| G211 | A, C, P, V |
| G249 | A, C, P, V, L, I, M, F, W, S, T, Y, H, N, Q, D, |
| | E, K, R |
| G250 | A, C, P, V, L, I, M, F, W, S, T, Y, H, N, Q, D, |
| | E, K, R |
| L257 | V, M, I, K, R, F, Y, W, S, T, C, H, N, Q, D, E |
| F259 | G, A, C, P, V, L, I, M, Y, W, S, T, Y, H, N, Q, |
| | D, E, K, R |
| M331 | G, A, S, P, C, T, D, N, E, Q, H, V, L, I, K, R |
| S332 | G, A |

[0138] For example, in some embodiments, in a non-natural OLS of the disclosure based on any one of SEQ ID NOs: 122-126, there can be an amino acid variant selected from G, S, T, C, Y, H, N, Q, D, E, K, or R at position 125, which replaces the wild type A. However, the corresponding position in SEQ ID NO: 128 is shifted +11, which corresponds to position 136. Since the wild type amino acid at position 136 in SEQ ID NO: 128 is already T, the amino acid variant can be selected from G, S, C, Y, H, N, Q, D, E, K, and R (i.e., excluding the wild-type T as a possibility) for position 136 to create a non-natural OLS. In embodiments wherein a single amino acid variant is prescribed at a certain amino acid position, but the prescribed substitution is already present as a wild type amino acid at that position, then another variant amino acid position is looked to so the non-natural OLS can be based on a non-wild type, prescribed variant, amino acid.

[0139] In some embodiments, the non-naturally-occurring OLS contains one or more of the following mutations relative to the corresponding to the amino acid positions of SEQ ID NO:122: A125G, A125S, A125T, A125C, A125Y, A125H, A125N, A125Q, A125D, A125E, A125K, A125R, S126G, S126A, D185G, D185G, D185A, D185S, D185P, D185C, D185T, D185N, M187G, M187A, M187S, M187P, M187C, M187T, M187D, M187N, M187E, M187Q, M187H, M187H, M187V, M187L, M187I, M187K, M187R, L190G, L190A, L190S, L190P, L190C, L190T, L190D, L190N, L190E, L190Q, L190H, L190V, L190M, L190I, L190K, L190R, G204A, G204C, G204P, G204V, G204L, G204I, G204M, G204F, G204W, G204S, G204T, G204Y, G204H, G204N, G204Q, G204D, G204E, G204K, G204R, G209A, G209C, G209P, G209V, G209L, G209I, G209M, G209F, G209W, G209S, G209T, G209Y, G209H, G209N, G209Q, G209D, G209E, G209K, G209R, D210A, D210C, D210P, D210V, D210L, D210I, D210M, D210F, D210W, D210S, D210T, D210Y, D210H, D210N, D210Q, D210E, D210K, D210R, G211A, G211C, G211P, G211V, G211L, G211I, G211M, G211F, G211W, G211S, G211T, G211Y, G211H, G211N, G211Q, G211D, G211E, G211K, G211R, G249A, G249C, G249P, G249V, G249L, G249I, G249M, G249F, G249W, G249S, G249T, G249Y, G249H, G249N, G249Q, G249D, G249E, G249K, G249R, G249S, G249T, G249Y, G250A, G250C, G250P, G250V, G250L, G250I, G250M, G250F, G250W, G250S, G250T, G250Y, G250H, G250N, G250Q, G250D, G250E, G250K, G250R, L257V, L257M, L257I, L257K, L257R, L257F, L257Y, L257W, L257S, L257T, L257C, L257H, L257N, L257Q, L257D, L257E, F259G, F259A, F259C, F259P, F259V, F259L, F259I, F259M, F259Y, F259W, F259S, F259T, F259Y, F259H, F259N, F259Q, F259D, F259E, F259K, F259R, M331G, M331A, M331S, M331P, M331C, M331T, M331D, M331N, M331E, M331Q, M331H, M331V, M331L, M331I, M331K, M331R, S332G, and S332A. It is understood that the foregoing mutations, while identified in the context of SEQ ID NO.: 122 may be made to the corresponding amino acids in an OLS of SEQ ID NOs: 123-131.

[0140] Non-natural OLS variants are also described in commonly assigned International Application No. PCT/US2020/028766, filed Apr. 17, 2020 (Noble, et al.), the disclosure of which is incorporated herein by reference.

[0141] In some embodiments, non-natural OLS with one or more variant amino acids as described herein are enzymatically capable of at least about 1.2, 1.5, 2, 3, 4, 5, 6, 7, 8, 9, 10, 12, 15, 20, or greater rate of formation of OA and/or olivetol from malonyl-CoA and hexanoyl-CoA in the presence of excess OAC enzyme, as compared to the wild type OLS.

[0142] In some embodiments, the OAC is present in molar excess of OLS. In some embodiments, the molar ratio of OLS to OAC is about 1:1.1, 1:1.2, 1:1.5, 1:1.8, 1:2, 1:3, 1:4, 1:5, 1:10, 1:20, 1:25, 1:50, 1:75, 1:100, 1:125, 1:150, 1:200, 1:250, 1:300, 1:350, 1:400, 1:450, 1:500, 1:1000, 1:1250, 1:1500, 1:2000, 1:2500, 1:5000, 1:7500, 1:10,000, or more. In some embodiments, the catalytic rate of OAC is greater than OLS. In some embodiments, the ratio of the catalytic rate of OLS to OAC is about 1:1.1, 1:1.2, 1:1.5, 1:1.8, 1:2, 1:3, 1:4, 1:5, 1:10, 1:20, 1:25, 1:50, 1:75, 1:100, 1:125, 1:150, 1:200, 1:250, 1:300, 1:350, 1:400, 1:450, 1:500, 1:1000, 1:1250, 1:1500, 1:2000, 1:2500, 1:5000, 1:7500, 1:10,000, or more.

[0143] For example, in the presence of excess OAC the increase in rate of formation of olivetolic acid from malonyl-CoA and hexanoyl-CoA, as compared to the wild olivetol synthase, can be in the range of about 1.2 times to about 300 times, about 1.5 times to about 200 times, or about 2 times to about 30 times as determined in an in vitro enzymatic reaction using purified olivetol synthase variant.

[0144] (i) Mal-CoA Availability

[0145] Availability of the Mal-CoA levels inside the cell may be increased by increasing the functional ACC activity within the cell. In some aspects, engineered cells of the present invention express higher ACC activity compared to host cells. The elevated ACC activity may be achieved using one or more of the following strategies/modifications: (i) overexpress one or more (i.e., one, two, three, four, or more) endogenous ACC subunit proteins (e.g., under the control of a heterologous promoter); (ii) expressing one or more (i.e., one, two, three, four, or more) exogenous (e.g., heterologous) ACC subunit proteins; (iii) expressing one or more multi-domain proteins having ACC activity (e.g., that are identical or substantially identical to the fungal ACC genes described herein); and (iv) expressing one or more non-naturally-occurring proteins that have an activity associated with one of the ACC subunit proteins or the activity associated with a multi-domain ACC protein. Each of these strategies/modifications is described in more detail below.

[0146] Acetyl-CoA Carboxylase (ACC; EC 6.4.1.2) catalyzes the committed step in fatty acid biosynthesis in carboxylating acetyl-CoA to produce malonyl-CoA. Malonyl-CoA also is a key substrate for cannabinoid formation, where three malonyl-CoA molecules are successively condensed with an acyl-CoA molecule (e.g., hexanoyl-CoA) to form a tetraketide (e.g., 3,5,7-trioxododecanoyl-CoA or 3,5,7-trioxododecanoic acid). In prokaryotes (e.g., E. coli) and the chloroplasts of plants and algae, ACC typically is a multi-subunit enzyme. The typical prokaryotic (E. coli) ACC has four polypeptide subunits: accA (EC 2.1.3.15), accB (EC 6.4.1.2), accC (EC 6.3.4.14), and accD (EC 2.1.3.15) that assemble into a complex having three functional subunits: a tetramer made up of two homodimers of the biotin carboxylase subunit (BC, P_417722, encoded by accC, in E. coli), a heterotetramer of two of each of the accA and accD subunits (P_414727 and P_416819) forming the carboxytransferase (CT), and the biotin carboxylase carrier protein (BCCP, encoded by accB, P_417721 in E. coli) (see Broussard et al. (2013) Biochemistry 14:3346-3357). In prokaryotes, biotin protein ligase (BPL, encoded by BirA in E. coli) covalently attaches biotin to the carboxylase subunit; this function is performed by a holocarboxylase synthetase in eukaryotes. Thus, one or more of the endogenous ACC subunit proteins may be overexpressed using an exogenous (e.g., a heterologous) promoter. Alternatively, a cell may be engineered to express one or more the ACC subunit proteins from a different species under the control of an endogenous promoter or an exogenous (e.g., heterologous) promoter. Alternatively, an expression system (e.g., vector) may be constructed in which one, two, three, or all four of the ACC subunit proteins are expressed as a single polypeptide joined directly or through a polypeptide linker. For example, if all four ACC subunit proteins were linked and expressed as a single protein, the result would mimic the fungal multi-domain proteins described below.

[0147] Fungal ACC genes encode large single chain polypeptides having multiple active domains which, together, have ACC activity. The multi-domain proteins, including the fungal ACC genes, generally have three conserved catalytic domains contained within the protein. The catalytic domains, arranged in N-to-C order, include the biotin carboxylase (BC) domain, the biotin-carboxyl carrier protein (BCCP) domain, and the carboxyltransferase (CT) domain.

[0148] The BC domain contains an ATP binding site which, in many instances, has an amino acid sequence that is identical or substantially identical to:
[0149] G(F/Y)P(V/L)MIKASEGGGGKGIR(M/K/Q)(V/A) (SEQ ID NO: 118)

[0150] The BCCP domain contains a biotin binding site which, in many instances, has an amino acid sequence that is identical or substantially identical to: EVMKM (SEQ ID NO: 119). Additionally, the BCCP domain frequently contains two proline residues located about 26 and 34 residues upstream from the biotin binding site. These proline residues may for a hinge region.

[0151] The CT domain contains binding sites for carboxybiotin and acetyl-CoA. These binding sites generally conform to the structures found in other carboxylase enzymes. For example, a carboxybiotin binding site may be identical or substantially identical to:
[0152] GR(X)₆NDIT(X)₂IGSFG(X)₂ED(X)₇E(L/Y)AR(X)₂GIRR(IN)YL(A/S)ANSGARI
[0153] (SEQ ID NO: 120).
   The acetyl-CoA binding site may identical or substantially identical to:
[0154] A(R/K)(T/G)VVVGRARLGGIP(M/L/V)GV(I/V)(S/A/G)
[0155] (SEQ ID NO: 121).

[0156] The fungal ACC genes may be under the control of a promoter and regulatory sequences from the host cell, the fungal cell from which the ACC gene is derived, or another heterologous promoter. The engineered cells expressing the fungal ACC gene(s) may retain endogenous expression of the native ACC gene(s) and subunits, may be engineered to overexpress the native ACC gene(s) and subunits, or may have expression of one or more of the native ACC gene(s) and subunits reduced or eliminated (knocked out). Thus, in some embodiments, one or more nucleic acid sequences encoding a fungal ACC or derivative thereof is overexpressed in a host cell.

[0157] Suitable fungal ACC enzymes include the ACC from Mucor circinelloides f. circinelloides strain 1006PhL (SEQ ID NO: 1) and other fungal proteins having substantial amino acid sequence identity and similar enzymatic activity. One nucleic acid sequence encoding the Mucor circinelloides f. circinelloides strain 1006PhL ACC protein is provided at SEQ ID NO: 101. Table 2 provides examples of suitable fungal ACC enzymes that may be used in the engineered cells provided herein. Considered for use in the engineered cells provided herein are single domain protein ACC homologs of other species, and nucleic acids encoding the same, as well as variants of naturally-occurring single domain protein ACCs having at least 50%, at least 55%, at least 60%, at least 65%, at least 70%, at least 75%, at least 80%, at least 85%, at least 90%, at least 95%, at least 96%, at least 97% at least 98%, or at least 99% amino acid identity to SEQ ID NO: 1 and that have the enzymatic activity of an ACC.

TABLE 2
Fungal Acetyl-CoA Carboxylases

| | GenBank | SEQ ID |
|---|---|---|
| Species | Accession No. | NO: |
| Mucor circinelloides f. circinelloides | EPB82652.1 | 1 |
| 1006PhL | | |
| Amylomyces rouxii | ABQ28729.1 | 2 |
| Mucor circinelloides f. lusitanicus CBS | OAD07937.1 | 3 |
| 277.49 | | |
| Mucor ambiguus | GAN08941.1 | 4 |
| Parasitella parasitica | CEP09288.1 | 5 |
| Rhizopus stolonifer | RCI05537.1 | 6 |
| Choanephora cucurbitarum | OBZ91864.1 | 7 |
| Rhizopus delemar RA 99-880 | EIE80272.1 | 8 |
| Rhizopus microsporus ATCC 52813 | XP_023470433.1 | 9 |
| Rhizopus microsporus | ORE23244.1 | 10 |
| Rhizopus microspores | CEG63811.1 | 11 |
| Rhizopus azygosporus | RCH96152.1 | 12 |
| Rhizopus microspores | CEI99071.1 | 13 |
| Absidia repens | ORZ25473.1 | 14 |
| Absidia glauca | SAL97607.1 | 15 |
| Phycomyces blakesleeanus NRRL 1555(-) | XP_018296012.1 | 16 |
| Hesseltinella vesiculosa | ORX57605.1 | 17 |
| Rhizopus stolonifera | EPB82652.2 | 18 |
| Lichtheimia ramose | ABQ28729.2 | 19 |
| Lichtheimia ramose | OAD07937.2 | 20 |
| Lichtheimia corymbifera JMRC:FSU:9682 | GAN08941.2 | 21 |
| Absidia glauca | CEP09288.2 | 22 |
| Syncephalastrum racemosum | RCI05537.2 | 23 |
| Mucor circinelloides f. circinelloides | OBZ91864.2 | 24 |
| 1006PhL | | |
| Mucor circinelloides f. lusitanicus CBS | EIE80272.2 | 25 |
| 277.49 | | |
| Mucor ambiguous | XP_023470433.2 | 26 |
| Lichtheimia corymbifera JMRC:FSU:9682 | ORE23244.2 | 27 |
| Bifiguratus adelaidae | CEG63811.2 | 28 |
| Endogone sp. FLAS-F59071 | RCH96152.2 | 29 |
| Glomus cerebriforme | CEI99071.2 | 30 |
| Jimgerdemannia flammicorona | ORZ25473.2 | 31 |
| Lobosporangium transversal | SAL97607.2 | 32 |
| Rhizophagus irregularis | XP_018296012.2 | 33 |
| Rhizophagus irregularis | ORX57605.2 | 34 |
| Rhizophagus irregularis | EPB82652.3 | 35 |
| Rhizophagus irregularis | ABQ28729.3 | 36 |
| Mortierella elongata AG-77 | OAD07937.3 | 37 |
| Mortierella verticillata NRRL 6337 | GAN08941.3 | 38 |
| Diversispora epigaea | CEP09288.3 | 39 |
| Rhizophagus irregularis | RCI05537.3 | 40 |
| Rhizophagus clarus | OBZ91864.3 | 41 |
| Basidiobolus meristosporus CBS 931.73 | EIE80272.3 | 42 |
| Gigaspora rosea | XP_023470433.3 | 43 |
| Rhizophagus irregularis | ORE23244.3 | 44 |
| Rhizophagus diaphanus [Rhizophagus sp. | CEG63811.3 | 45 |
| MUCL 43196] | | |
| Basidiobolus meristosporus CBS 931.73 | RCH96152.3 | 46 |
| Saitoella complicata NRRL Y-17804 | CEI9907L3 | 47 |
| Saitoella complicata NRRL Y-17804 | ORZ25473.3 | 48 |
| Basidiobolus meristosporus CBS 931.73 | SAL97607.3 | 49 |
| Coleophoma cylindrospora | XP_018296012.3 | 50 |
| Dactylellina haptotyla CBS 200.50 | ORX57605.3 | 51 |
| Pyronema omphalodes CBS 100304 | EPB82652.4 | 52 |
| Aspergillus fischeri NRRL 181 | ABQ28729.4 | 53 |
| Coleophoma crateriformis | OAD07937.4 | 54 |
| Aspergillus turcosus | GAN08941.4 | 55 |
| Aspergillus lentulus | CEP09288.4 | 56 |
| Byssochlamys spectabilis | RCI05537.4 | 57 |
| Aspergillus fumigatus A1163 | OBZ91864.4 | 58 |
| Aspergillus udagawae | EIE80272.4 | 59 |
| Aspergillus thermomutatus | XP_023470433.4 | 60 |
| Aspergillus fumigatus Af293 | ORE23244.4 | 61 |
| Botrytis tulipae | CEG63811.4 | 62 |
| Morchella conica CCBAS932 | RCH96152.4 | 63 |
| Botrytis cinerea B05.10 | CEI99071.4 | 64 |
| Aspergillus fumigatus var. RP-2014 | ORZ25473.4 | 65 |
| Botrytis galanthina | SAL97607.4 | 66 |
| Botrytis elliptica | XP_018296012.4 | 67 |
| Byssochlamys spectabilis No. 5 | ORX57605.4 | 68 |
| Xylona heveae TC161 | EPB82652.5 | 69 |
| Botrytis cinerea BcDW1 | ABQ28729.5 | 70 |
| Phialocephala scopiformis | OAD07937.5 | 71 |
| Sclerotinia sclerotiorum 1980 UF-70 | GAN08941.5 | 72 |
| Amorphotheca resinae ATCC 22711 | CEP09288.5 | 73 |
| Aspergillus oryzae RIB40 | RCI05537.5 | 74 |
| Aspergillus parasiticus SU-1 | OBZ91864.5 | 75 |
| Phialocephala subalpine | EIE80272.5 | 76 |
| Rutstroemia sp. NJR-2017a WRK4 | XP_023470433.5 | 77 |
| Rutstroemia sp. NJR-2017a BVV2 | ORE23244.5 | 78 |
| Aspergillus costaricaensis CBS 115574 | CEG63811.5 | 79 |
| Pezoloma ericae | RCH96152.5 | 80 |
| Aspergillus brasiliensis CBS 101740 | CEI99071.5 | 81 |
| Aspergillus vadensis CBS 113365 | ORZ25473.5 | 82 |
| Aspergillus heteromorphus CBS 117.55 | SAL97607.5 | 83 |
| Aspergillus piperis CBS 112811 | XP_018296012.5 | 84 |
| Rutstroemia sp. NJR-2017a BBW | ORX57605.5 | 85 |
| Drechslerella stenobrocha 248 | EPB82652.6 | 86 |
| Botrytis hyacinthi | ABQ28729.6 | 87 |
| Aspergillus bombycis | OAD07937.6 | 88 |
| Glonium stellatum | GAN08941.6 | 89 |
| Botryotinia convolute | CEP09288.6 | 90 |
| Aspergillus clavatus NRRL 1 | RCI05537.6 | 91 |
| Aspergillus neoniger CBS 115656 | OBZ91864.6 | 92 |
| Erysiphe pulchra | EIE80272.6 | 93 |
| Penicillium chrysogenum | XP_023470433.6 | 94 |
| Penicillium rubens Wisconsin 54-1255 | ORE23244.6 | 95 |
| Botrytis paeoniae | CEG63811.6 | 96 |
| Glarea lozoyensis ATCC 20868 | RCH96152.6 | 97 |
| Aspergillus eucalypticola CBS 122712 | CEI99071.6 | 98 |
| Pseudogymnoascus sp. VKM F-4515 | ORZ25473.6 | 99 |
| (FW-2607) | | |
| Aspergillus niger CBS 513.88 | SAL97607.6 | 100 |
| Saccharomyces cerevisiae | AAA20073 | 208 |
| Yarrowia lipolytica | VBB85319 | 209 |

[0158] In some embodiments, increasing the malonyl CoA availability inside the engineered cell improves the ratio of Olivetolic acid/PDAL as compared a control cell with identical genotype exception that the control cell does not have increased malonyl-CoA availability inside the cell.

[0159] (ii) Mal-CoA Degradation

[0160] Mal-CoA is a common intracellular precursor for a wide array of biomolecules and processes. In order to increase Mal-CoA availability for the OA synthetic pathway, and ultimately CBGA production, it may be desirable to inhibit (i.e., reduce or completely block) competing Mal-CoA metabolic pathways. As illustrated in FIG. 1, fatty acid biosynthesis utilizes a significant amount of intracellular Mal-CoA in a competitive pathway that does not result in cannabinoid production. Thus, limiting fatty acid biosynthesis can increase the Mal-CoA supply available for cannabinoid biosynthesis. In some embodiments, the engineered cell has one or more genes of a fatty acid biosynthetic pathway downregulated, deleted, or disrupted. The following discussion illustrates certain principles of the invention and fatty acid biosynthesis genes that may be disrupted however, these examples should not be taken as limiting. The invention includes the disruption or downregulation of any one or more genes known to be involved in any fatty acid biosynthetic pathway that consumes Mal-CoA.

[0161] In some embodiments, the engineered cells have a downregulation, deletion, or disruption of the malonyl-CoA-ACP transacylase gene (FabD; EC 2.3.1.39) which catalyzes the transfer of a the malonyl moiety from Mal-CoA to an acyl carrier protein (ACP) with the concomitant release of the free CoA. This is the first step in the fatty acid biosynthetic pathway and represents a significant source of Mal-CoA consumption. In an E. coli host cell, for example, the FabD gene and protein are homologs to or have sequences that are substantially identical to those of the E. coli K-12 MG1655 FabD and provided at SEQ ID NO: 102 (see, for example, GenBank Accession No. NP 415610.1).

[0162] In some embodiments, the engineered cells have a downregulation, deletion, or disruption of the 3-hydroxyacyl-ACP dehydratase (FabZ; EC 4.2.1.59) which catalyzes the dehydration of 3-hydroxyacyl-ACP to enoyl-ACP. This is an intermediate step in the fatty acid biosynthetic pathway. Disruption of FabZ alone or in combination with disruption of FabD reduces or eliminates Mal-CoA consumption by this pathway. In an E. coli host cell, for example, the FabZ gene and protein are homologs to or have sequences that are substantially identical to those of the E. coli K-12 MG1655 FabZ and provided at SEQ ID NO: 103 (see, for example, GenBank Accession No. NP 414722.1).

[0163] Host cells that are engineered for increased malonyl-CoA supply also can include genetic modifications such as, but not limited to, downregulation, including disruption, of genes encoding enzymes that may reduce the supply of acetyl-CoA and/or malonyl-CoA available for OA or cannabinoid production, such as but not limited to alcohol dehydrogenase, lactate dehydrogenase, phosphate acetyl transferase, acetate kinase, succinate dehydrogenase, or citrate synthase. Downregulation of one or more genes encoding fatty acid biosynthesis enzymes (e.g., in prokaryotic hosts FabH, FabB, FabF, FabG, FabA, and/or FabI).

[0164] (iii) Acyl-CoA Production

[0165] As shown in FIG. 1, acyl-CoA (e.g., Hex-CoA) is condensed with three molecules of Mal-CoA by OLS (or another Type III PKS) to generate a tetraketide (e.g., 3,5,7-trioxododecanoyl-CoA or 3,5,7-trioxododecanoic acid) which is subsequently converted to OA (or an analog thereof). In some embodiments, in E. coli, the fatty acid CoA ligase, fadD (EC 6.2.1.3), catalyzes the esterification of fatty acids into metabolically active CoA thioesters. In particular, fadD or a variant of fadD is responsible for catalyzing the reaction between hexanoic acid and CoA to produce Hex-CoA. Thus, the host cells may be engineered to overexpress endogenous fadD or a variant of fadD or another enzyme in the EC 6.2.1.3 class, or express or overexpress a heterologous fadD or EC 6.2.1.3 class enzyme. In some embodiments, the variant of fadD is a non-naturally occurring variant of fadD. In some embodiments, the fadD variant comprises one or more amino acid substitutions. One example of E. coli fadD protein, obtained from E. coli K-12 MG1656, is found at NCBI Accession No. NP 416319.1 and provided as SEQ ID NO: 104. Also included within the invention are naturally-occurring and non-naturally-occurring homologs of the fadD protein based on the same of different species from the host cell, and nucleic acids encoding the same. Such variant proteins have at least 50%, at least 55%, at least 60%, at least 65%, at least 70%, at least 75%, at least 80%, at least 85%, at least 90%, at least 95%, at least 96%, at least 97% at least 98%, or at least 99% amino acid identity to SEQ ID NO: 104 and that have the enzymatic activity of EC 6.2.1.3. Engineered cells which express a heterologous fadD or EC 6.2.1.3 class enzyme may retain endogenous expression of the native fadD gene, may be engineered to overexpress the native fadD gene, or may have expression of the native fadD gene reduced or eliminated (knocked out).

[0166] (iv) Acyl-CoA Degradation

[0167] Acyl-CoA (e.g., Hex-CoA) is a common intracellular precursor for a wide array of biomolecules and processes. In order to increase acyl-CoA (e.g., Hex-CoA) availability for the OA synthetic pathway, and ultimately cannabinoid production, it may be desirable to inhibit (i.e., reduce or completely block) competing acyl-CoA (e.g., Hex-CoA) metabolic pathways. In some embodiments, the engineered cells have a downregulation, deletion, or disruption of one or more of the thioesterase genes that degrade Hex-CoA. In E. coli, such genes include, for example, TesB (NP 414986.1; acyl-CoA thioesterase II; EC 3.1.2.20; SEQ ID NO: 107), YciA (NP 415769.1; acyl-CoA thioesterase; EC 3.1.2.20; SEQ ID Ns: 108), and YbgC (NP 415264.1; acyl-CoA esterase/thioesterase; SEQ ID NO: 109), ydiI, tesA, and fadM. It is understood that endogenous homologs and other endogenous enzymes that have substantially the same catalytic activity may be downregulated, deleted, or disrupted and that the precise identity of these homologs depends upon the specific host cell type.

[0168] As illustrated in FIG. 1, certain fatty acid degradation reactions utilize a significant amount of intracellular acyl-CoA (e.g., Hex-CoA) pathway in a competitive pathway that does not result in cannabinoid production. Thus, limiting these competing fatty acid degradation reactions can increase the acyl-CoA (e.g., Hex-CoA) supply available for cannabinoid biosynthesis. In some embodiments, the engineered cell has one or more genes of a fatty acid degradation pathway downregulated, deleted, or disrupted. In E. coli, for example, the fadE gene (NP_414756.2; acyl-CoA dehydrogenase; EC 1.3.8.1; SEQ ID NO: 105) can be downregulated, disrupted, or deleted. It is understood that endogenous homologs and other endogenous enzymes that have substantially the same catalytic activity may be downregulated, deleted, or disrupted and that the precise identity of these homologs depends upon the specific host cell type.

[0169] Alternatively, or in addition to the downregulation, disruption, or deletion offadE, the engineered cell may have downregulation, disruption, or deletion in another gene associated with fatty acid degradation. In E. coli another suitable gene is fadB (NP_418288; enoyl-CoA hydratase; EC 4.2.1.17; SEQ ID NO: 106) which catalyzes the formation of 3-oxoacyl-CoA from enoyl-CoA via 3-hydroxyacyl-CoA. It is understood that endogenous homologs and other endogenous enzymes that have substantially the same catalytic activity may be downregulated, deleted, or disrupted and that the precise identity of these homologs depends upon the specific host cell type. In some embodiments, E. coli fadA gene can be downregulated, disrupted or deleted.

[0170] GPP Synthetic Pathway

[0171] GPP and its precursors may be produced from several pathways within a host cells including the mevalonate pathway (MVA) or methylerythritol-4-phosphate (MEP) pathway (also known as the deoxyxylulose-5-phosphate pathway), which produce isopentenyl pyrophosphate (IPP) and dimethylallyl pyrophosphate (DMAPP), which are converted to geranyl pyrophosphate (GPP) using geranyl pyrophosphate synthase. A prenyltransferase converts OLA or its analogs or derivatives and GPP to a cannabinoid (e.g., CBGA, the common precursor to cannabinoids). Exemplary MVA and MEP pathways are shown in FIG. 5. The result of both the MVA pathway and the MEP pathway are the GPP precursors IPP and DMAPP which, as described in more detail below, may be isomerized through the action of, for example, the idi gene product, and combined, for example, through the action of the idsA gene product. Expression of an exogenous (e.g., heterologous) or overexpression of an endogenous gene that encodes any one or more of the enzymes in the MVA and/or MEP pathways increases the production of GPP and, ultimately, that of CBGA (or its analogs).

[0172] FIG. 1 illustrates two alternative GPP synthetic pathways from prenol and isoprenol. In the non-MVA pathway prenol is phosphorylated to dimethylallyl phosphate (DMAP) and then to dimethylallyl pyrophosphate (DMAPP) or directly to DMAPP. Phosphorylation of DMAP to DMAPP is catalyzed by isopentenyl phosphate kinase (IPK). Phosphorylation of prenol to DMAPP is catalyzed by prenol diphosphokinase. DMAPP and isopentenyl pyrophosphate (IPP) may be isomerized. GPP is synthesized from DMAPP and IPP in a reaction catalyzed by a GPP synthase. The non-MVA, non-MEP pathways are illustrated with additional detail in FIG. 6 and FIG. 7. Expression of an exogenous (e.g., heterologous) or overexpression of an endogenous gene that encodes any one or more of the enzymes in the non-MVA, non-MEP pathways increases the production of GPP and, ultimately, that of CBGA (or its analogs).

[0173] In the non-MEP, non-MVA pathways, isoprenol is phosphorylated to isopentenyl phosphate (IP) and then to to IPP or directly to isopentenyl pyrophosphate (IPP). Similarly, prenol is phosphorylated to dimethyl allyl pyrophosphate which can be converted to IPP. The non-MVA, non-MEP pathway has a common synthetic conclusion in that IPP is isomerized to DMAPP and/or combined with DMAPP to yield GPP. Expression of an exogenous (e.g., heterologous) or overexpression of an endogenous gene that encodes any one or more of the enzymes in the non-MEP pathway increases the production of GPP and, ultimately, that of CBGA.

[0174] In some embodiments, the host cells may be engineered to overexpress endogenous IPK or another enzyme in the EC 2.7.4.26 class, or express or overexpress a heterologous IPK or EC 2.7.4.26 class enzyme. One example of IPK, obtained from Methanothermobacter thermautotrophicus, is found at NCBI Accession No. WP_010875687.1 which is provided as SEQ ID NO: 110. Also included within the invention are naturally-occurring and non-naturally-occurring homologs of the IPK protein based on the same of different species from the host cell, and nucleic acids encoding the same. Such variant proteins have at least 50%, at least 55%, at least 60%, at least 65%, at least 70%, at least 75%, at least 80%, at least 85%, at least 90%, at least 95%, at least 96%, at least 97% at least 98%, or at least 99% amino acid identity to SEQ ID NO: 110 and that have the enzymatic activity of EC 2.7.4.26. Engineered cells which express a heterologous IPK or EC 2.7.4.26 class enzyme may retain endogenous expression of the native IPK gene, may be engineered to overexpress the native IPK gene, or may have expression of the native IPK gene reduced or eliminated (knocked out). Other enzymes that have a similar activity to IPK may be substituted for or used in addition to the IPK described herein. One class of such enzymes includes the choline kinases (EC 2.7.1.32).

[0175] In other embodiments, the host cells may be engineered to overexpress endogenous GPP synthase or another enzyme in the EC 2.5.1.- (e.g., EC 2.5.1.1) class, or express or overexpress a heterologous GPP synthase or EC 2.5.1.-class enzyme. Suitable GPP synthases for these embodiments include, for example, E. coli IspA (NP_414955, SEQ ID NO:111) and C. glutamicum IdsA (WP 011014931.1, SEQ ID NO:112). Also included within the invention are naturally-occurring and non-naturally-occurring homologs of GPP synthase based on the same of different species from the host cell, and nucleic acids encoding the same. Such variant proteins have at least 50%, at least 55%, at least 60%, at least 65%, at least 70%, at least 75%, at least 80%, at least 85%, at least 90%, at least 95%, at least 96%, at least 97% at least 98%, or at least 99% amino acid identity to SEQ ID NO: 111 and that have the enzymatic activity of EC 2.5.1.-. Engineered cells which express a heterologous GPP synthase or EC 2.5.1.-class enzyme may retain endogenous expression of the native GPP synthase gene, may be engineered to overexpress the native GPP synthase gene, or may have expression of the native GPP synthase gene reduced or eliminated (knocked out). Other GPP synthases that may be expressed or overexpressed in the engineered cells of the present invention include those provided in Table 3 and GPP synthases that are substantially identical (i.e., at least 95% identical) to the GPP synthases of Table 3. Other enzymes that have a similar activity to GPP synthase may be substituted for or used in addition to the GPP synthase described herein including, for example, the farnesyl pyrophosphate synthases (EC 2.5.1.10; “FPP synthases”) and the geranylgeranyl pyrophosphate synthases (EC 2.5.1.1; “GGPP synthases”).

TABLE 3
GPP Synthase Enzymes

| | Gen Bank | SEQ ID |
|---|---|---|
| Species | Accession No. | NO: |
| Corynebacterium crudilactis | WP_074025495.1 | 152 |
| Corynebacterium glutamicum | WP_096457048.1 | 153 |
| Corynebacterium deserti | WP_053545301.1 | 154 |
| Corynebacterium callunae | WP_015651699.1 | 155 |
| Corynebacterium efficiens | WP_006768068.1 | 156 |
| Corynebacterium sp. Marseille-P2417 | WP_080794061.1 | 157 |
| Corynebacterium humireducens | WP_040086238.1 | 158 |
| Corynebacterium halotolerans | WP_015401326.1 | 159 |
| Corynebacterium marinum | WP_042621772.1 | 160 |
| Corynebacterium singulare | WP_042531577.1 | 161 |
| Corynebacterium minutissimum | WP_115022907.1 | 162 |
| Corynebacterium pollutisoli | WP_143337494.1 | 163 |
| Corynebacterium lubricantis | WP_018297093.1 | 164 |
| Corynebacterium spheniscorum | WP_092284621.1 | 165 |
| Corynebacterium doosanense | WP_018020857.1 | 166 |
| Corynebacterium flavescens | WP_075731219.1 | 167 |
| Corynebacterium aurimucosum | WP_143334899.1 | 168 |
| Corynebacterium ammoniagenes | WP_003845210.1 | 169 |
| Corynebacterium keflrresidentii | WP_086587718.1 | 170 |
| Corynebacterium camporealensis | WP_035105251.1 | 171 |
| Corynebacterium tuberculostearicum | WP_005328932.1 | 172 |
| Corynebacteri um pseudogenitalium | WP_005324491.1 | 173 |
| Corynebacterium testudinoris | WP_083985528.1 | 174 |
| Corynebacterium stationis | WP_066793135.1 | 175 |
| Corynebacterium sp. J010B-136 | WP_105324112.1 | 176 |
| Corynebacterium sp. CCUG 69366 | WP_123047545.1 | 177 |
| Corynebacterium sp. KPL1818 | WP_023030480.1 | 178 |
| Corynebacterium accolens | WP_005283903.1 | 179 |
| Corynebacterium segmentosum | WP_126319428.1 | 180 |
| Corynebacterium macginleyi | WP_121911356.1 | 181 |
| Pseudomonas aeruginosa | SQG59150.1 | 182 |
| Streptococcus thermophilus | VDG63248.1 | 183 |
| Nocardia vermiculata | WP_084473733.1 | 184 |
| Rhodococcus sp. 1168 | WP_088945631.1 | 185 |
| Clostridium paraputrifleum | WP_113570111.1 | 186 |
| Nocardia cyriacigeorgica | WP_036535265.1 | 187 |
| Nocardia concava | WP_040806894.1 | 188 |
| Rhodococcus yunnanensis | WP_072806331.1 | 189 |

[0176] A complementary modification that may be introduced into the engineered cells in order to increase GPP production is the deletion, disruption, or downregulation of one or more Nudix hydrolases (EC 3.6.1.19). These enzymes act on a high diversity of substrates having a general structure consisting of a nucleoside diphosphate (“NDP”) linked to another moiety (“X”). The Nudix hydrolyases catalyze the hydrolysis of a pyrophosphate bond in a nucleoside diphosphate linked to some other moiety, “x”. The general hydrolase reaction cleaves NDP-X to NMP and P-X. Additionally, some Nudix proteins have been shown to dephosphorylate IPP, DMAPP, and GPP. For example, NudA, NudB, NudC, NudD, NudE, NudF, NudG, NudH, Nudl, NudJ, NudK, NudL, NudM dephosphorylate GPP, IPP, and/or dimethyl allyl pyrophosphate at varying degrees. FIG. 10 shows the dephosphorylation of IPP to 3-methyl-3-butanol by various Nudix proteins. In particular, the downregulation or disruption of one or more Nudix hydrolases in the engineered cell blocks a significant degradation pathway for several important metabolites including, for example, isopentyl pyrophosphate (IPP), dimethylallyl pyrophosphate (DMAPP), and geranyl pyrophosphate (GPP).

[0177] CBGA Production

[0178] CBGA is formed by the following reaction:

geranyl diphosphate+2,4-dihydroxy-6-pentylbenzoate [symbol] diphosphate+CBGA which is catalyzed by a geranyl-pyrophosphate-olivetolic acid geranyltransferase (EC 2.5.1.102). The enzyme carrying out the above reaction in C. sativa is a transmembrane prenyltransferase belonging to the UbiA superfamily of membrane proteins. See for example CsPT1 as described in WO2011017798A1 and CsPT4, as described in WO2018200888 and WO20190300888. However, the above reaction has also been reported to be carried out by a different family of enzymes. In particular, aromatic prenyltransferases that are soluble, non-transmembrane, and have a 10-stranded antiparallel β-barrel consisting of 5 repeated αββα motifs, can catalyze the transfer of isoprenoid chains to aromatic rings. For example, Yang, Y., et al. (Biochemistry 51:2606-180, 2012) reports that NphB, a Streptomyces-derived, soluble enzyme, catalyzes the attachment of a 10-carbon geranyl group to aromatic substrates; originally identified in the biosynthetic pathway of the antioxidant naphterpin. Yang notes the reaction mechanism of the prenylation step has been characterized as a S(N)1 type dissociative mechanism with a weakly stable carbocation intermediate. NphB catalyzes the prenyl transfer between GPP and 1,6 dihydroxynaphthalene (1,6-DHN) and yields three products with the geranyl moiety attaching to different carbon atoms of 1,6-DHN. The major product 5 geranyl DHN and minor product 2-geranyl DHN were characterized with a product ratio of 10:1. However, Kumano, et al. (Bioorg. Med. Chem, 16, 8117-8126 (2008)), reports rates and regioselectivity measurements for NphB-catalyzed geranylation of olivetol, with mixed regioselectivity at 2- and 4-OL ring positions, and rates of 0.0026 mol 2-geranyl-OL/min/mol NphB and 0.0016 mol 4-geranyl-OL/min/mol NphB, which are extremely slow.

[0179] Thus, the cells of the present invention may be engineered to overexpress a naturally-occurring prenyltransferase (e.g., nphB) or express or overexpress an exogenous (e.g., heterologous) prenyltransferase such that the production of a cannabinoid (e.g., CBGA) (or derivatives thereof) is increased relative to the host cells. Generally, the disclosure provides non-natural prenyltransferases that can form prenylated alkylbenzenediols or prenylated dihydroxyalkylbenzenoic acids from a substrate comprising a hydrophobic portion such as geranyl pyrophosphate, and alkylbenzenediols or dihydroxyalkylbenzenoic acids, respectively, at increased enzymatic rates as compared to wild-type versions of the enzymes. For example, the disclosure provides non-natural prenyltransferases that are enzymatically capable of greater rates of formation of 3-geranyl-olivetolate (3-GOLA; cannabigerolic acid; CBGA) from geranyl pyrophosphate and olivetolic acid, and/or that are enzymatically capable of greater rates of formation of cannabigerorcinic acid (CBGOA) from orsellinic acid (OSA) and geranyl diphosphate (GPP). Further, non-natural prenyltransferases of the disclosure with these increased enzymatic rates also demonstrate regioselectivity towards desired products, for example, the variants are capable of regioselectivity (e.g., about 90% or greater, about 95% or greater) to 2-prenylated, 5-alkylbenzene-1,3-diol or 3-prenylated, 2,4-dihydroxy 6-alkylbenzenoic acid from geranyl pyrophosphate and a 5-alkylbenzene-1,3-diol, or a 2,4-dihydroxy 6-alkylbenzenoic acid.

[0180] Non-natural prenyltransferase variants of the disclosure include those based on previously identified non-natural prenyltransferase variants already demonstrating improved enzymatic activity and desired regioselectivity over the wild type prenyltransferase. In particular, a non-natural prenyltransferase triple variant (Seq1C) used for generation of further variants is described in commonly assigned International Application No. PCT/US2019/021448 (filed Mar. 8, 2019; Noble, M.), wherein the triple Seq1C variant is based on SEQ ID NO:1 having Q159S, S212H, and Y286V variant amino acids. Enzyme activity of the Seq1C triple variant was shown to be >300-fold greater for conversion of OLA to CBGA, and >100-fold greater for conversion of OSA to CBGOA over the wild type prenyltransferase enzyme (SEQ ID NO: 1).

[0181] In some embodiments, the prenyltransferase comprises the amino acid sequence set forth in any one of SEQ ID NOs: 132-146 or that is substantially identical to SEQ ID NOs: 132-146, provided that the enzyme exhibits prenyltransferase activity. SEQ ID NO: 132 provides the amino acid sequence of the prenyltransferase of Streptomyces antibioticus AQJ23_40425 and is used as the reference sequence for numbering the amino acids when referring to various homologs and/or mutations. (Also see, International Application No. PCT/US2019/021448; hereby incorporated by reference in its entirety.) In some embodiments, the non-naturally-occurring prenyltransferase comprises one or more (e.g., two, three, four, five, six, seven, eight, or more) of the following mutations, with reference to SEQ ID NO: 132, or at the corresponding amino acid locations in SEQ ID NOs: 133-146: 5S, 17T, 25V, 38G, 45I; 45T; 45S, 49T; 51T, 51C, 51D, 51E, 51F, 51G, 51H, 51I, 51K, 51L, 51M, 51N, 51P, 51Q, 51R, 51S, 51T, 51V, 51W, 51Y; 62A; 78V; 80S; 104E; 106G; 110D, 110G; 116N, 116Q; 116A, 116D; 119W; 121V, 121A, 121L, 121K, 121H, 121W; 124K; 124L; 124S; 159S, 159A, 159C, 159D, 159E, 159F, 159G, 159H, 159I, 159K, 159L, 159M, 159P, 159R, 159T, 159V, 159W, 159Y; 160L; 160V; 160I; 164E; 171D; 172V; 173D; 173K; 173P; 173Q; 173E; 173F; 175W, 175E, 175Y; 203L, 203M; 207G; 211M 212F, 212R, 212A, 212C, 212D, 212D, 212E, 212G, 212K, 212L, 212M, 212P, 212Q, 212V, 212T, 212V, 212W, 212Y, 212H; 212N; 214A; 217F; 224A; 225E; 226E, 226Q; 228N, 228S; 230S; 232K; 232N; 232R; 232S; 232T; 241A; 257A; 267A; 267W, 267P; 268Y; 269E, 269F; 272V; 281L; 286A, 286C, 286D, 286E, 286F, 286G, 286G, 286H, 286H, 286I, 286K, 286L, 286M, 286N, 286P, 286Q, 286R, 286T, 286V; 286W; 288H; 290A; 2901; 290M; 290S; 292A, 292F, 292N; 293A, 293W, 293C, 293D, 293E, 293F, 293G, 293G, 293H, 293I, 293K, 293L, 293M, 293N, 293P, 293R, 293S, 293T, 293V, 293W; 294K; 294H; 296I; 296K; 296M; 296Q; 300I; 300P; 300Y; and 303V. Preferably, those non-naturally-occurring prenyltransferases are substantially identical to one or more of SEQ ID NOs: 132-146.

[0182] Optional additional mutations relative to SEQ ID NO: 132, or at the corresponding amino acid locations in SEQ ID NOs: 133-146, include: 47S, 47N, 47G; 121L; 161R, 161H, 161S; 175H, 175K, 175R; 211H; 211N; 214H; 230S; 268Y; 269N; 284S; 285Y; 286F, 286L, 286M, 286P, 286T, 286V, 286I, 286A; 288V, 288I; 296I; 293H, 293M, 293F, 293W, 293C, 293C, 293A, 293S, 293V, 293D, 293Y, 293E, 293I, and 293T.

[0183] In some embodiments, the non-naturally-occurring prenyltransferase comprises the following mutations relative to SEQ ID NO: 132, or at the corresponding amino acid locations in SEQ ID NOs: 133-146: (i) 45I, (ii) 159S, and (iii) 286V; (i) 45T, (ii) 159S, and (iii) 286V; (i) 121V, (ii) 159S, and (iii) 286V; (i) 124K, (ii) 159S, and (iii) 286V; (i) 124L, (ii) 159S, and (iii) 286V; (i) 159S, (ii) 160L, and (iii) 286V; (i) 159S, (ii) 160L, and (iii) 286V; (i) 159S, (ii) 160S, and (iii) 286V; (i) 159S, (ii) 173D, and (iii) 286V; (i) 159S, (ii) 173K, and (iii) 286V; (i) 159S, (ii) 173P, and (iii) 286V; (i) 159S, (ii) 173Q, and (iii) 286V; (i) 159S, (ii) 173Y, and (iii) 286V; (i) 159S, (ii) 212H, and (iii) 286V; (i) 159S, (ii) 230S, and (iii) 286V; (i) 159S, (ii) 267P, and (iii) 286V; (i) 159S, (ii) 286V, and (iii) 293H; (i) 159S, (ii) 286V, and (iii) 294K; (i) 159S, (ii) 286V, and (iii) 296K; (i) 159S, (ii) 286V, and (iii) 296L; (i) 159S, (ii) 286V, and (iii) 296M; (i) 159S, (ii) 286V, and (iii) 296Q; (i) 159S, (ii) 286V, and (iii) 296M; (i) 159S, (ii) 286V, and (iii) 300F; and (i) 159S, (ii) 286V, and (iii) 300Y.

[0184] In some embodiments, the non-naturally-occurring prenyltransferase comprises the following mutations relative to SEQ ID NO: 132, or at the corresponding amino acid locations in SEQ ID NOs: 133-146: (i) 45I, (ii) 159S, (iii) 212H, and (iv) 286V; (i) V45T, (ii) 159S, (iii) 212H, and (iv) 286V; (i) 121V, (ii) 159S, (iii) 212H, and (iv) 286V; (i) 124K, (ii) 159S, (iii) 212H, and (iv) 286V; (i) 124L, (ii) 159S, (iii) 212H, and (iv) 286V; (i) 159S, (ii) 160L, (iii) 212H, and (iv) 286V; (i) 159S, (ii) 160L, (iii) 212H, and (iv) 286V; (i) 159S, (ii) 160S, (iii) 212H, and (iv) 286V; (i) 159S, (ii) 173D, (iii) 212H, and (iv) 286V; (i) 159S, (ii) 173K, (iii) 212H, and (iv) 286V; (i) 159S, (ii) 173P, (iii) 212H, and (iv) 286V; (i) 159S, (ii) 173Q, (iii) 212H, and (iv) 286V; (i) 159S, (ii) 173Y, (iii) 212H, and (iv) 286V; (i) 159S, (ii) 212H, (iii) 213V, and (iv) 286V; (i) 159S, (ii) 212H, (iii) 230S, and (iv) 286V; (i) 159S, (ii) 212H, (iii) 267P, and (iv) 286V; (i) 159S, (ii) 212H, (iii) 286V, and (iv) 293H; (i) 159S, (ii) 212H, (iii) 286V, and (iv) 294K; (i) 159S, (ii) 212H, (iii) 286V, and (iv) 296K; (i) 159S, (ii) 212H, (iii) 286V, and (iv) 296L; (i) 159S, (ii) 212H, (iii) 286V, and (iv) 296M; (i) 159S, (ii) 212H, (iii) 286V, and (iv) 296Q; (i) 159S, (ii) 212H, (iii) 286V, and (iv) 296M; (i) 159S, (ii) 212H, (iii) 286V, and (iv) 300F; and (i) 159S, (ii) 212H, (iii) 286V, and (iv) 300Y.

[0185] In some embodiments, non-natural prenyltransferases with one or more variant amino acids as describe herein are enzymatically capable of a greater rate of formation of cannabigerolic acid from geranyl pyrophosphate and olivetolic acid, as compared to the wild type prenyltransferase. Variants were also identified that displayed very high activity on the order of about 300 fold or greater rate of formation of cannabigerolic acid from geranyl pyrophosphate and olivetolic acid, as compared to the wild type prenyltransferase. For example, the increase in rate of formation of cannabigerolic acid from geranyl pyrophosphate and olivetolic acid, as compared to the wild type prenyltransferase, can be in the range of about 1.5× to about 750×, about 5× to about 750×, or about 10× to about 750× as determined in an in vitro enzymatic reaction using purified prenyltransferase variant.

[0186] Using a purified prenyltransferase preparation the rate of formation of CBGA can be determined. The rate can be expressed in terms of μM CBGA/min/μM enzyme. Reaction conditions can be as follows: 50 mM HEPES, pH 7.5 buffer containing 1 mM geranyl pyrophosphate (Sigma-Aldrich) and 1 mM olivetolic acid (Santa Cruz Biotechnology) and 5 mM magnesium chloride. Reactions are initiated by addition of purified prenyltransferase and then incubated for a measured period of 0.5 to 2 hours, quenched with acetonitrile to a final concentration of 65%, then centrifuged to pellet denatured protein. Supernatants are transferred to 96-well plates for GCMS analysis of CBGA (3-GOLA) and 5-GOLA.

[0187] In embodiments, the prenyltransferase variants provide a rate of formation of CBGA of greater than 0.005 μM CBGA/min/μM enzyme, greater than about 0.010 μM CBGA/min/μM enzyme, greater than about 0.020 μM CBGA/min/μM enzyme, greater than about 0.050 μM CBGA/min/μM enzyme, greater than about 0.100 μM CBGA/min/μM enzyme, greater than about 0.250 μM CBGA/min/μM enzyme, greater than about 0.500 μM CBGA/min/μM enzyme, such as in the range of about 0.005 μM or 0.010 μM to about 1.250 μM CBGA/min/μM enzyme, or in the range of about 0.020 μM to about 1.0 μM CBGA/min/μM enzyme.

[0188] Improving Cannabinoid or Derivatives Efflux

[0189] The efficiency of the cannabinoid (or derivatives thereof) synthetic pathway may be improved by increasing the cannabinoid (or derivatives thereof) efflux from the engineered cell so that the various synthetic reactions do not become product-limited. By continually and efficiently depleting the reaction products (i.e., cannabinoid or derivatives thereof), all reactions are driven in the forward direction and reactants/precursors are less likely to be diverted to alternate (non-cannabinoid) pathways.

[0190] In some embodiments, the cannabinoid is CBGA, THCV, THCVA, CBDV, CBDVA, CBN, CBNA, CBD, CBDA, CBC, CBCA, CBGV, CBGVA, CBG, CBCV, CBCVA, THC, THCA, analogs, or derivatives thereof, or combinations thereof.

[0191] It has been discovered that cannabinoid (or derivatives thereof) efflux may be increased by overexpressing one or more genes of the endogenous ybh operon and/or the entire operon itself, or expressing one or more exogenous (e.g., a heterologous) ybh genes or operon. The ybh operon consists of ybiH, ybhG, ybhF, ybhS, and ybhR. All of these genes encode putative integral membrane or membrane transport proteins except ybiH, which is a transcriptional regulator. The predicted gene products comprise the subunits of an ATP-binding cassette (ABC) superfamily membrane transporter and membrane fusion protein, indicating that this operon encodes the components of a transport complex spanning the inner and outer membranes of E. coli.

[0192] In some embodiments, the host cells may be engineered to overexpress one or more endogenous cannabinoid (or derivatives thereof) transporters and accessory proteins, or express or overexpress one or more heterologous CBGA transporters and accessory proteins. Examples of cannabinoid (or derivatives thereof) transporters obtained from E. coli K-12 MG1656 include ybhS (NP_415314.1; multidrug ABC transporter permease; EC 7.6.2.2; SEQ ID NO: 113), ybhF (NP_415315.2; multidrug ABC transporter ATP-binding protein; EC 7.6.2.2; SEQ ID NO: 114), ybhR (NP_415313.1; EC 7.6.2.2; multidrug ABC transporter permease; SEQ ID NO: 115), and ybhG (NP_415316.1; UPF0194 membrane protein; EC 7.6.2.2; SEQ ID NO: 116). Other proteins involved in cannabinoid (or derivatives thereof) efflux that may be overexpressed and/or expressed exogenously in engineered cells include blc (NP_418573; SEQ ID NO: 147), ydhC (YP_025306; SEQ ID NO: 148), mlaD (NP_417660.1; SEQ ID NO: 149), mlaE (NP_417661.1; SEQ ID NO: 150), and mlaf (NP_417662.1; SEQ ID NO: 151), and EmrB/QacA subfamily drug resistance transporters, such as pur8 proteins, including SEQ ID NO: 210 (A0A0F7N8B6); SEQ ID NO: 211 (A0A0F7NJP6); and SEQ ID NO: 212 (A0A0F7N8B6); and SEQ ID NO: 213 (2775244747), and SEQ ID NO: 214 (2515835837). The following identifiers/accessions numbers are provided SEQ ID NO: 210 (AA: A0A0F7N8B6; NA: 2654644352, Ga0081730_111627); SEQ ID NO: 211 (AA:A0A0F7NJP6; NA: 2654644361, Ga0081730_111636); SEQ ID NO: 212 (AA: A0A0F7N8B6; NA: 2561472617, T413DRAFT_02996), SEQ ID NO: 213 (NA: 2775244747, Ga0198854_112262), and SEQ ID NO: 214 (NA: 2515835837, B100DRAFT_06500). Other ABC-type transporters include the following genes from E. coli: msbA (UniProt P60752; SEQ ID NO: 215), macAB, (UniProt P75830, P75831; SEQ ID NO: 216), mdlAB (UniProt P77265, P0AAG5; SEQ ID NO: 217), yadGH (UniProt P36879, P0AFN6; SEQ ID NO: 218), ybbAP (UniProt P0A9T8, P77504; SEQ ID NO: 219), yddA (UniProt P31826; SEQ ID NO: 220), yojI (UniProt P33941; SEQ ID NO: 221), and yhhJ (UniProt P0AGH1; SEQ ID NO: 222). ABC-type transporters in E. coli are discussed in Moussatova et al. (Biochim Biophys Acta 1778:1757-71, 2008).

[0193] In some embodiments, the host cell is engineered to express one or more exogenous nucleic acid sequences or overexpress one or more endogenous genes encoding a protein having a resistance-nodulation-cell division (RND) transporter. As discussed Anes et al. (Frontiers Microbiol, 6:587, 2015), and with reference to Nikaido, H. (Adv. Enzymol. Relat. Areas Mol. Biol. 77,1-60, 2011) resistance-nodulation-cell division transporters operate as part of a tripartite system composed of the RND pump located in the inner membrane, a periplasmic adaptor protein from the MFP family and an OMP belonging to the outer membrane factor (OMF) family located in the outer membrane. Exemplary RND-type transporters include the following genes from E. coli: acrAB (Uniprot P0AE06, P31224; SEQ ID NO: 223). acrEF (Uniprot P24180, P24181; SEQ ID NO: 224), mdtABC (Uniprot P76397, P76398, P76399; SEQ ID NO: 225), mdtEF (Uniprot P37636, P37637; SEQ ID NO: 226), emrAB (Uniprot P27303, P0AEJ0; SEQ ID NO: 227), and tolC (Uniprot P02930; SEQ ID NO: 228).

[0194] In some embodiments, the host cell is engineered to express one or more exogenous nucleic acid sequences or overexpress one or more endogenous genes encoding a protein having a prokaryotic small multidrug (SMR) transporter. As discussed in Jack, D. L., et al. (Eur. J. Biochem. 268, 3620-3639 (2001)) SMR family pumps are prokaryotic transport systems consisting of homo-oligomeric or heterooligomeric structures, with subunits of 100-120 aminoacyl residues in length and that span the membrane as a helices four times. An exemplary SMR transporter includes the following gene from E. coli: emrE (UniProt P23895; SEQ ID NO: 229).

[0195] In some embodiments, the host cell is engineered to express one or more exogenous nucleic acid sequences or overexpress one or more endogenous genes encoding a protein that is a member of the major facilitator superfamily (DIES). As described in Yan, (Ann. Rev. Biophys. 44:257, 2015) MPS proteins transport a broad spectrum of ions and solutes across membranes via facilitated diffusion, symport, or antiport. Exemplary MFS-type transporters include the following genes from E. coli: mdtM (Uniprot P39386; SEQ ID NO: 230) and mdfA (Uniprot P0AEY8; SEQ ID NO: 231).

[0196] In some embodiments the engineered cell expresses (a) exogenous nucleic acid sequences encoding (a1) olivetol synthase, (a2) olivetolic acid cyclase, (a3) prenyltransferase, and (a4) one or more genes of a MVA pathway, MEP pathway, or a non-MVA, non-MEP pathway; and (b) one or more of the following: (b1) a multi-domain acetyl-CoA carboxylase (MD-ACC), overexpress acetyl-CoA carboxyltransferase subunit α, biotin carboxyl carrier protein, biotin carboxylase, and/or acetyl-CoA carboxyltransferase subunit β, or expresses acetyl-CoA carboxyltransferase, biotin carboxyl carrier protein, and/or biotin carboxylase, (b2) a fatty acyl-CoA ligase, disruption or downregulation of fatty acid beta-oxidation repressor or fatty acid biosynthesis upregulator, 3-oxoacyl-[acyl-carrier-protein] synthase, enoyl-[acyl-carrier-protein] reductase, and (b3) ABC transporter permease; ABC transporter ATP-binding protein; a protein with at least 60% identity to: the blc gene product of SEQ ID NO: 147, ybhG gene product of SEQ ID NO: 116, or the ydhC gene product of SEQ ID NO: 148, or EmrB/QacA subfamily drug resistance transporters, such as the pur8 protein, of one of SEQ ID NOs: 210-214, or expresses one or more exogenous nucleic acids sequences or overexpress one or more endogenous genes that encodes a protein that is at least 60% identical to the mlaD gene product of SEQ ID NO: 149, the mlaE gene product of SEQ ID NO: 150, the mlaF gene product of SEQ ID NO: 151, or the RND family MdtABC.

[0197] In some embodiments the engineered cell expresses: (a1)-(a4) and (b1); (a1)-(a4) and (b2); (a1)-(a4) and (b3); (a1)-(a4), (b1) and (b2); (a1)-(a4), (b1) and (b3); (a1)-(a4), (b2) and (b3); (a1)-(a4) and (b1)-(b3). In some embodiments, (b1) is expression of acetyl-CoA carboxyltransferase (ACC), such as C. glutamicum or M. circinelloides ACC, or a protein having >60%, ≥65%, ≥70%, ≥75%, ≥80%, ≥85%, ≥90%, ≥95%, ≥97%, ≥99%, or 100% identity to said sequences. In some embodiments, (b2) is deletion, disruption, or reduced expression of one or more of fabA, fabB, fabD, fabF, fabG, fabH, fabL, fadE, fadD, fadI, fadM, fadL, and fadR. In some embodiments (b3) is expression of one or more of blc, ybhG, ydhC, mlaD, mlaE, mlaF, or MdtABC.

[0198] Also included within the invention are naturally-occurring and non-naturally-occurring homologs of cannabinoid (or derivatives thereof) transporters based on the same of different species from the host cell, and nucleic acids encoding the same. Such variant proteins have at least 50%, at least 55%, at least 60%, at least 65%, at least 70%, at least 75%, at least 80%, at least 85%, at least 90%, at least 95%, at least 96%, at least 97% at least 98%, or at least 99% amino acid identity to any of the foregoing. Engineered cells which express a heterologous cannabinoid (or derivatives thereof) transporter, accessory protein, or EC 7.6.2.2 class enzyme/protein may retain endogenous expression of the native cannabinoid (or derivatives thereof) transporter, accessory protein, or EC 7.6.2.2 class enzyme/protein, may be engineered to overexpress the native cannabinoid (or derivatives thereof) transporter, accessory protein, or EC 7.6.2.2 class enzyme/protein, or may have expression of the native cannabinoid (or derivatives thereof) transporter gene, accessory protein gene, or EC 7.6.2.2 class enzyme/protein gene reduced or eliminated (knocked out).

[0199] The transcriptional regulator ybiH (cecR) (NP_415317.1; SEQ ID NO: 117), isolated from E. coli K-12 MG1656, is an HTH-type transcriptional dual regulator down-regulates the expression of certain endogenous cannabinoid (or derivatives thereof) transporters and accessory proteins. Thus, in some embodiments, host cells are engineered to have ybiH downregulated, deleted, or disrupted in order to increase the expression of one or more endogenous cannabinoid (or derivatives thereof) transporters or accessory proteins, and/or to increase the expression of one or more heterologous cannabinoid (or derivatives thereof) transporters or accessory proteins that are regulated under the same or similar promoters. Although ybiH is identified in E. coli K-12 MG1656, it is understood that endogenous homologs and other endogenous transcriptional regulators that have substantially the same activity may be downregulated, deleted, or disrupted and that the precise identity of these homologs depends upon the specific host cell type.

[0200] Host Cells

[0201] A host cell as provided herein can be a prokaryotic cell or a eukaryotic cell. Eukaryotic cells may be microbial eukaryotic cells, such as, for example, fungal cells or microalgal cells. Further, a eukaryotic cell engineered to produce at least one cannabinoid can be a cell or cell line derived from a multicellular eukaryote, such as but not limited to an alga, moss, or higher plant. Prokaryotic cells that can be engineered as provided herein include bacterial cells, archaebacterial cells, and cyanobacterial cells.

[0202] In some embodiments, a host cell is a microorganism such as a bacterium, filamentous fungus, or yeast. Host can be selected based on their ability to take up and utilize particular carbon sources, nitrogen sources, or precursor molecules or may be engineered to take up and utilize molecules that may be added to the culture medium.

[0203] Nonlimiting examples of suitable microbial hosts for the bio-production of a cannabinoid include, but are not limited to, any Gram negative organisms, more particularly a member of the family Enterobacteriaceae, such as E. coli, or Oligotropha carboxidovorans, or a Pseudomononas sp.; any Gram positive microorganism, for example Bacillus subtilis, Lactobaccilus sp. or Lactococcus sp.; a yeast, for example Saccharomyces cerevisiae, Pichia pastoris or Pichia stipitis; and other groups or microbial species. More particularly, suitable microbial hosts for the bio-production of cannabinoids generally include, but are not limited to, members of the genera Clostridium, Zymomonas, Escherichia, Salmonella, Rhodococcus, Pseudomonas, Bacillus, Lactobacillus, Enterococcus, Alcaligenes, Klebsiella, Paenibacillus, Arthrobacter, Corynebacterium, Brevibacterium, Pichia, Candida, Hansenula, and Saccharomyces. Hosts that may be particularly of interest include: Oligotropha carboxidovorans (such as strain OM5), Escherichia coli, Alcaligenes eutrophus (Cupriavidus necator), Bacillus licheniformis, Paenibacillus macerans, Rhodococcus erythropolis, Pseudomonas putida, Lactobacillus plantarum, Enterococcus faecium, Enterococcus gallinarium, Enterococcus faecalis, Bacillus subtilis and Saccharomyces cerevisiae.

[0204] A variety of microorganism may be suitable for the production of cannabinoids in cell culture. Such organisms include both prokaryotic and eukaryotic organisms including, but not limited to, bacteria, including archaea and eubacteria, and eukaryotes, including yeast, plant, insect, animal, and mammal, including human. Exemplary species are reported in U.S. application Ser. No. 13/975,678 (filed Aug. 26, 2013), which is incorporated herein by reference, and include, for example, Escherichia coli, Saccharomyces cerevisiae, Saccharomyces kluyveri, Candida boidinii, Clostridium kluyveri, Clostridium acetobutylicum, Clostridium beijerinckii, Clostridium saccharoperbutylacetonicum, Clostridium perfringens, Clostridium difficile, Clostridium botulinum, Clostridium tyrobutyricum, Clostridium tetanomorphum, Clostridium tetani, Clostridium propionicum, Clostridium aminobutyricum, Clostridium sub terminale, Clostridium sticklandii, Ralstonia eutropha, Mycobacterium bovis, Mycobacterium tuberculosis, Porphyromonas gingivalis, Arabidopsis thaliana, Thermus thermophilus, Pseudomonas species, including Pseudomonas aeruginosa, Pseudomonas putida, Pseudomonas stutzeri, Pseudomonas fluorescens, Homo sapiens, Oryctolagus cuniculus, Rhodobacter spaeroides, Thermoanaerobacter brockii, Metallosphaera sedula, Leuconostoc mesenteroides, Chloroflexus aurantiacus, Roseiflexus castenholzii, Erythrobacter, Simmondsia chinensis, Acinetobacter species, including Acinetobacter calcoaceticus and Acinetobacter baylyi, Porphyromonas gingivalis, Sulfolobus tokodaii, Sulfolobus solfataricus, Sulfolobus acidocaldarius, Bacillus subtilis, Bacillus cereus, Bacillus megaterium, Bacillus brevis, Bacillus pumilus, Rattus norvegicus, Klebsiella pneumonia, Klebsiella oxytoca, Euglena gracilis, Treponema denticola, Moorella thermoacetica, Thermotoga maritima, Halobacterium salinarum, Geobacillus stearothermophilus, Aeropyrum pernix, Sus scrofa, Caenorhabditis elegans, Corynebacterium glutamicum, Acidaminococcus fermentans, Lactococcus lactis, Lactobacillus plantarum, Streptococcus thermophilus, Enterobacter aerogenes, Candida, Aspergillus terreus, Pedicoccus pentosaceus, Zymomonas mobilus, Acetobacter pasteurians, Kluyveromyces lactis, Eubacterium barkeri, Bacteroides capillosus, Anaerotruncus colihominis, Natranaerobius thermophilusm, Campylobacter jejuni, Haemophilus influenzae, Serratia marcescens, Citrobacter amalonaticus, Myxococcus xanthus, Fusobacterium nuleatum, Penicillium chrysogenum, marine gamma proteobacterium, butyrate producing bacterium, Nocardia iowensis, Nocardia farcinica, Streptomyces griseus, Schizosaccharomyces pombe, Geobacillus thermoglucosidasius, Salmonella typhimurium, Vibrio cholera, Heliobacter pylori, Nicotiana tabacum, Oryza sativa, Haloferax mediterranei, Agrobacterium tumefaciens, Achromobacter denitrificans, Fusobacterium nucleatum, Streptomyces clavuligenus, Acinetobacter baumanii, Mus musculus, Lachancea kluyveri, Trichomonas vaginalis, Trypanosoma brucei, Pseudomonas stutzeri, Bradyrhizobium japonicum, Mesorhizobium loti, Bos taurus, Nicotiana glutinosa, Vibrio vulnificus, Selenomonas ruminantium, Vibrio parahaemolyticus, Archaeoglobus fulgidus, Haloarcula marismortui, Pyrobaculum aerophilum, Mycobacterium smegmatis MC2 155, Mycobacterium avium subsp. paratuberculosis K-10, Mycobacterium marinum M, Tsukamurella paurometabola DSM 20162, Cyanobium PCC7001, Dictyostelium discoideum AX4, as well as other exemplary species disclosed herein or available as source organisms for corresponding genes.

[0205] In certain embodiments, suitable organisms include Acinetobacter baumannii Naval-82, Acinetobacter sp. ADP1, Acinetobacter sp. strain M-1, Actinobacillus succinogenes 130Z, Allochromatium vinosum DSM 180, Amycolatopsis methanolica, Arabidopsis thaliana, Atopobium parvulum DSM 20469, Azotobacter vinelandii DJ, Bacillus alcalophilus ATCC 27647, Bacillus azotoformans LMG 9581, Bacillus coagulans 36D1, Bacillus megaterium, Bacillus methanolicus MGA3, Bacillus methanolicus PB1, Bacillus methanolicus PB-1, Bacillus selenitireducens MLS10, Bacillus smithii, Bacillus subtilis, Burkholderia cenocepacia, Burkholderia cepacia, Burkholderia multivorans, Burkholderia pyrrocinia, Burkholderia stabilis, Burkholderia thailandensis E264, Burkholderiales bacterium Joshi 001, Butyrate producing bacterium L2-50, Campylobacter jejuni, Candida albicans, Candida boidinii, Candida methylica, Carboxydothermus hydrogenoformans, Carboxydothermus hydrogenoformans Z-2901, Caulobacter sp. AP07, Chloroflexus aggregans DSM 9485, Chloroflexus aurantiacus J-10-fl Citrobacter freundii, Citrobacter koseri ATCC BAA-895, Citrobacter youngae, Clostridium, Clostridium acetobutylicum, Clostridium acetobutylicum ATCC 824, Clostridium acidurici, Clostridium aminobutyricum, Clostridium asparagiforme DSM 15981, Clostridium beijerinckii, Clostridium beijerinckii NCIMB 8052, Clostridium bolteae ATCC BAA-613, Clostridium carboxidivorans P7, Clostridium cellulovorans 743B, Clostridium difficile, Clostridium hiranonis DSM 13275, Clostridium hylemonae DSM 15053, Clostridium kluyveri, Clostridium kluyveri DSM 555, Clostridium ljungdahli, Clostridium ljungdahlii DSM 13528, Clostridium methylpentosum DSM 5476, Clostridium pasteurianum, Clostridium pasteurianum DSM 525, Clostridium perfringens, Clostridium perfringens ATCC 13124, Clostridium perfringens str. 13, Clostridium phytofermentans ISDg, Clostridium saccharobutylicum, Clostridium saccharoperbutylacetonicum, Clostridium saccharoperbutylacetonicum N1-4, Clostridium tetani, Corynebacterium glutamicum ATCC 14067, Corynebacterium glutamicum R, Corynebacterium sp. U-96, Corynebacterium variabile, Cupriavidus necator N-1, Cyanobium PCC7001, Desulfatibacillum alkenivorans AK-01, Desulfitobacterium hafniense, Desulfitobacterium metallireducens DSM 15288, Desulfotomaculum reducens MI-1, Desulfovibrio africanus str. Walvis Bay, Desulfovibrio fructosovorans JJ, Desulfovibrio vulgaris str. Hildenborough, Desulfovibrio vulgaris str. Miyazaki F, Dictyostelium discoideum AX4, Escherichia coli, Escherichia coli K-12, Escherichia coli K-12 MG1655, Eubacterium hallii DSM 3353, Flavobacterium frigoris, Fusobacterium nucleatum subsp. polymorphum ATCC 10953, Geobacillus sp. Y4.1MC1, Geobacillus themodenitrificans NG80-2, Geobacter bemidfiensis Bem, Geobacter sulfurreducens, Geobacter sulfurreducens PCA, Geobacillus stearothermophilus DSM 2334, Haemophilus influenzae, Helicobacter pylori, Homo sapiens, Hydrogenobacter thermophilus, Hydrogenobacter thermophilus TK-6, Hyphomicrobium denitrificans ATCC 51888, Hyphomicrobium zavarzinii, Klebsiella pneumoniae, Klebsiella pneumoniae subsp. pneumoniae MGH 78578, Lactobacillus brevis ATCC 367, Leuconostoc mesenteroides, Lysinibacillus fusiformis, Lysinibacillus sphaericus, Mesorhizobiurn loti MAFF303099, Metallosphaera sedula, Methanosarcina acetivorans, Methanosarcina acetivorans C2A, Methanosarcina barkeri, Methanosarcina mazei Tuc01, Methylobacter marinus, Methylobacterium extorquens, Methylobacteriurn extorquens AM1, Methylococcus capsulatas, Methylomonas aminofaciens, Moorella thermoacetica, Mycobacter sp. strain JC1 DSM 3803, Mycobacterium avium subsp. paratuberculosis K-10, Mycobacterium bovis BCG, Mycobacterium gastri, Mycobacterium marinum M, Mycobacterium smegmatis, Mycobacterium smegmatis MC2 155, Mycobacterium tuberculosis, Nitrosopumilus salaria BD31, Nitrososphaera gargensis Ga9. 2, Nocardia farcinica IFM 10152, Nocardia iowensis (sp. NRRL 5646), Nostoc sp. PCC 7120, Ogataea angusta, Ogataea parapolymorpha DL-1 (Hansenula polymorpha DL-1), Paenibacillus peoriae KCTC 3763, Paracoccus denitrificans, Penicillium chrysogenum, Photobacterium profundum 3TCK, Phytofermentans ISDg, Pichia pastoris, Picrophilus torridus DSM9790, Porphyromonas gingivalis, Porphyromonas gingivalis W83, Pseudomonas aeruginosa PA01, Pseudomonas denitrificans, Pseudomonas knackmussii, Pseudomonas putida, Pseudomonas sp, Pseudomonas syringae pv. syringae B728a, Pyrobaculum islandicum DSM 4184, Pyrococcus abyssi, Pyrococcus furiosus, Pyrococcus horikoshii OT3, Ralstonia eutropha, Ralstonia eutropha H16, Rhodobacter capsulatus, Rhodobacter sphaeroides, Rhodobacter sphaeroides ATCC 17025, Rhodopseudomonas palustris, Rhodopseudomonas palustris CGA009, Rhodopseudomonas palustris DX-1, Rhodospirillum rubrum, Rhodospirillum rubrum ATCC 11170, Ruminococcus obeum ATCC 29174, Saccharomyces cerevisiae, Saccharomyces cerevisiae S288c, Salmonella enterica, Salmonella enterica subsp. enterica serovar Typhimurium str. LT2, Salmonella enterica typhimurium, Salmonella typhimurium, Schizosaccharomyces pombe, Sebaldella termitidis ATCC 33386, Shewanella oneidensis MR-1, Sinorhizobium meliloti 1021, Streptomyces coelicolor, Streptomyces griseus subsp. griseus NBRC 13350, Sulfolobus acidocalarius, Sulfolobus solfataricus P-2, Synechocystis str. PCC 6803, Syntrophobacter fumaroxidans, Thauera aromatica, Thermoanaerobacter sp. X514, Thermococcus kodakaraensis, Thermococcus litoralis, Thermoplasma acidophilum, Thermoproteus neutrophilus, Thermotoga maritima, Thiocapsa roseopersicina, Tolumonas auensis DSM 9187, Trichomonas vaginalis G3, Trypanosoma brucei, Tsukamurella paurometabola DSM 20162, Vibrio cholera, Vibrio harveyi ATCC BAA-1116, Xanthobacter autotrophicus Py2, Yersinia intermedia, or Zea mays.

[0206] Algae that can be engineered for cannabinoid production include, but are not limited to, unicellular and multicellular algae. Examples of such algae can include a species of rhodophyte, chlorophyte, heterokontophyte (including diatoms), tribophyte, glaucophyte, chlorarachniophyte, euglenoid, haptophyte, cryptomonad, dinoflagellum, phytoplankton, and the like, and combinations thereof. In one embodiment, algae can be of the classes Chlorophyceae and/or Haptophyta.

[0207] Microalgae (single-celled algae) produce natural oils that can contain the synthesized cannabinoids. Specific species that are considered for cannabinoid production include, but are not limited to, Neochloris oleoabundans, Scenedesmus dimorphus, Euglena gracilis, Phaeodactylum tricornutum, Pleurochrysis carterae, Prymnesium parvum, Tetraselmis chui, Nannochloropsis gaditiana. Dunaliella salina. Dunaliella tertiolecta, Chlorella vulgaris, Chlorella variabilis, and Chlamydomonas reinhardtii. Additional or alternate algal sources can include one or more microalgae of the Achnanthes, Amphiprora, Amphora, Ankistrodesmus, Asteromonas, Boekelovia, Borodinella, Botryococcus, Bracteococcus, Chaetoceros, Carteria, Chlamydomonas, Chlorococcum, Chlorogonium, Chlorella, Chroomonas, Chrsosphaera, Cricosphaera, Crypthecodinium, Cryptomonas, Cyclotella, Dunaliella, Ellipsoidon, Emiliania. Eremosphaera, Ernodesmius, Euglena, Franceia, Fragilaria, Gloeolhamnion, Haematococcus, Halocafeteria, Hymenomonas, Isochrysis, Lepocinclis, Micractinium, Monoraphidium, Nannochloris, Nannochloropsis, Navicula, Neochloris, Nephrochloris, Nephroselmis, Nitzschia, Ochromonas, Oedogonium, Oocystis, Ostreococcus, Pavlova, Parachlorella, Pascheria, Phaeodactylum, Phagus. Platymonas, Pleurochrsis, Pleurococcus, Prototheca, Pseudochlorella, Pyramimonas, Pvrobotrys, Scenedesmus, Skeletonema, Spyrogyra, Stichococcus, Tetraselmis, Thalassiosira, Viridiella, and Volvox species, and/or one or more cyanobacteria of the Agmenellum, Anabaena, Anabaenopsis, Anacystis, Aphanizomenon, Arthrospira, Asterocapsa, Borzia, Calothrix, Chamaesiphon, Chlorogloeopsis, Chroococcidiopsis, Chroococcus, Crinalium, Cyanobacterium, Cyanobium, Cyanocystis, Cyanospira, Cyanothece, Cylindrospermopsis, Cylindrospermum, Dactylcoccopsis, Dermocarpella, Fischerella, Fremyella, Geitleria, Geitlerinema, Gloeobacter, Gloeocapsa, Gloeothece, Halospirulina, Ivengariella, Leptolyngbya, Limnothrix, Lyngbya, Microcoleus, Microcystis, Mxosarcina, Nodularia, Nostoc, Nostochopsis, Oscillatoria, Phormidium, Planktothrix, Pleurocapsa, Prochlorococcus, Prochloron, Prochlorothrix, Pseudanabaena, Rivularia, Schizothrix, Scvtonema, Spirulina, Stanieria, Starria, Stigonema, Symploca, Synechococcus, Svnechocystis, Tolipothrix, Trichodesmium. Tychonema, and Xenococcus species.

[0208] The microalgae host cells can produce a storage oil, which in some embodiments can include hydrocarbons such as triacylglyceride that may be stored in storage bodies of the host cell as well as related products that can include, without limitation, phospholipids, tocopherols, tocotrienols, carotenoids (e.g., alpha-carotene, beta-carotene, lycopene, etc.), xanthophylls (e.g., lutein, zeaxanthin, alpha-cryptoxanthin and beta-crytoxanthin), cannabinoids, isoprenoids and various organic or inorganic compounds. A raw oil may be obtained from the cells by disrupting the cells and isolating the oil. See WO2008/151149, WO2010/06032, WO2011/150410, and WO2011/1504 which disclose heterotrophic cultivation and oil isolation techniques, and all of which are incorporated by reference in their entirety for all purposes. For example, oil may be obtained by cultivating, drying and pressing the cells. The oils produced may also be refined, bleached and deodorized (RBD) to remove phospholipids, free fatty acids and odors as known in the art or as described in WO2010/120939, which is incorporated by reference in its entirety for all purposes. The raw or RBD oils may be used in a variety of food, chemical, pharmaceutical, nutraceutical and industrial products or processes. After recovery of the oil, a valuable residual biomass remains. Uses for the residual biomass can include the production of paper, plastics, absorbents, adsorbents, as animal feed, for human nutrition, or for fertilizer.

[0209] The stable carbon isotope value 513C is an expression of the ratio of 13C/12C relative to a standard (e.g. PDB, carbonite of fossil skeleton of Belemnite americana from Peedee formation of South Carolina). The stable carbon isotope value 513C (0/00) of the oils can be related to the 513C value of the feedstock used. The oils can be derived from oleaginous organisms heterotrophically grown, for example, on sugar derived from a C4 plant such as corn or sugarcane. The 513C (0/00) of the oil can be from −10 to −17 0/00 or from −13 to −16 0/00.

[0210] The oils disclosed herein can be made by methods using a microalgal host cell. As described above, the microalga can be, without limitation, Chlorophyta, Trebouxiophyceae, Chlorellales, Chlorellaceae, or Chlorophyceae. It has been found that oils from microalgae of Trebouxiophyceae can be distinguished from vegetable oils based on their sterol profiles. Oil produced by Chlorella protothecoides can include sterols such as brassicasterol, ergosterol, campesterol, stigmasterol, and β-sitosterol. Sterols produced by Chlorella can have C24 stereochemistry. Microalgae oils can also include, for example, campesterol, stigmasterol, β-sitosterol, 22,23- dihydrobrassicasterol, proferasterol and clionasterol. Oils produced by the microalgae may be distinguished from plant oils by the presence of sterols with C24 stereochemistry and the absence of C24a stereochemistry in the sterols present. For example, the oils produced may contain 22,23-dihydrobrassicasterol while lacking campesterol; contain clionasterol, while lacking in β-sitosterol, and/or contain poriferasterol while lacking stigmasterol. Alternately, or in addition, the oils may contain significant amounts of Δ7-poriferasterol.

[0211] Oleaginous host cells engineered for production of cannabinoids as provided herein can produce an oil with at least 1% of cannabinoid. The oleaginous host cell (e.g., microalgae) can produce an oil, cannabinoid, triglyceride, isoprenoid or derivative of any of these. These host cells can be made by transforming a cell with any of the nucleic acids discussed herein. The transformed cell can be cultivated to produce an oil and, optionally, the oil can be extracted. Oil extracted can be used to produce food, oleochemicals, nutraceuticals, pharmaceuticals or other products.

[0212] The oils discussed above alone or in combination can be useful in the production of foods, pharmaceuticals, nutraceuticals, and chemicals. The oils, cannabinoids, isoprenoids, triglycerides can be subjected to decarboxylation, oxidation, light exposure, hydroamino methylation, methoxy-carbonation, ozonolysis, enzymatic transformations, epoxidation, methylation, dimerization, thiolation, metathesis, hydro-alkylation, lactonization, or other chemical processes. After extracting the oil, a residual biomass may be left, which may have use as a fuel, as an animal feed, or as an ingredient in paper, plastic, or other product.

[0213] The ability to genetically modify the host is essential for any recombinant production system. The mode of gene transfer technology may be by electroporation, conjugation, transduction or natural transformation.

[0214] Genetic Engineering Host Cells

[0215] The host cells or microorganisms of the disclosure include host strains or host cells that are genetically engineered to include genetic alterations designed to improve the rate, yield, or titer of cannabinoid production by cell cultures. Various optional genetic manipulations and alterations can be used interchangeably from one host cell to another, depending on the native enzymatic pathways present in the selected host cell.

[0216] To genetically modify a parent host cell to produce a genetically modified host cell of the present disclosure, one or more heterologous nucleic acids disclosed herein is introduced stably or transiently into a host cell, using established techniques. Such techniques may include, but are not limited to, electroporation, calcium phosphate precipitation, DEAE-dextran mediated transfection, liposome-mediated transfection, particle bombardment, and the like. For stable transformation, a heterologous nucleic acid will generally further include a selectable marker, e.g., any of several well-known selectable markers such as neomycin resistance, ampicillin resistance, tetracycline resistance, chloramphenicol resistance, kanamycin resistance, hygromycin resistance, G418 resistance, bleomycin resistance, zeocin resistance, and the like. A broad range of plasmids and drug resistance markers are available. The cloning vectors are tailored to the host organisms based on the nature of antibiotic resistance markers that can function in that host.

[0217] One or more nucleic acid sequences disclosed herein can be present in an expression vector or construct. Suitable expression vectors may include, but are not limited to, baculovirus vectors, bacteriophage vectors, plasmids, phagemids, cosmids, fosmids, bacterial artificial chromosomes, viral vectors (e.g. viral vectors based on vaccinia virus, poliovirus, adenovirus, adeno-associated virus, SV40, herpes simplex virus, and the like), P1-based artificial chromosomes, yeast plasmids, yeast artificial chromosomes, and any other vectors specific for specific hosts of interest (such as E. coli and yeast). Thus, for example, one or more nucleic acids encoding a cannabinoid pathway gene product is included in any one of a variety of expression vectors for expressing the cannabinoid pathway gene product(s). Such vectors may include chromosomal, non-chromosomal, and synthetic DNA sequences. Numerous additional suitable expression vectors are known to those of skill in the art, and many are commercially available. The following vectors are provided by way of example; for bacterial host cells: pQE vectors (Qiagen), pBluescript plasmids, pNH vectors, lambda-ZAP vectors (Stratagene); pTrc99a, pKK223-3, pDR540, and pRIT2T (Pharmacia); for eukaryotic host cells: pXT1, pSG5 (Stratagene), pSVK3, pBPV, pMSG, and pSVLSV40 (Pharmacia). However, any other plasmid or other vector may be used so long as it is compatible with the host cell.

[0218] In some embodiments, a parent host cell is genetically modified to produce a genetically modified host cell of the present disclosure using a CRISPR/Cas9 or other CRISPR system to genetically modify a parent host cell, for example, with one or more heterologous nucleic acids disclosed herein.

[0219] In some instances, a chemically synthesized or PCR-amplified nucleic acid fragment, or a nucleic acid fragment excised from a larger nucleic acid molecule or construct, can be introduced into a host cell and optionally integrated into a nucleic acid molecule of the host cell, for example, using CRISPR technology. A nucleic acid fragment introduced into a host cell may or may not include a selectable marker, and may or may not include an expression cassette. For example, a nucleic acid fragment introduced into a host cell for cas9 engineering (or engineering via another RNA-guided endonuclease, e.g., Cpf1) can optionally include the coding sequence of a gene or a portion thereof in the absence of a promoter sequence, or alternatively, may include a promoter sequence or portion thereof in the absence of a complete coding sequence linked to the promoter sequence. Vectors, constructs, and nucleic acid fragments designed for introduction into a host cell can in some embodiments optionally include sequences for mediating homologous recombination into a host chromosome or episome.

[0220] Heterologous natural or chemically synthesized genes for enzymes may be introduced on high-level expression plasmid vectors or through genomic integration using methods well known to those skilled in the art. Such methods may involve CRISPR technology. Alternatively, genes that are endogenous to the host organism may be up-regulated by genetic element integration methods known to those skilled in the art.

[0221] In some embodiments, one, two, three, four, or more of the nucleic acid sequences disclosed herein that encode an enzyme or other polypeptide that functions in a pathway for producing a cannabinoid or OA or a derivative thereof, or a pathway that reduces byproduct formation, are present in a single expression vector or construct. In some embodiments, two, three, four or more nucleic acid sequences disclosed herein that encode an enzyme or other polypeptide that functions in a pathway for producing a cannabinoid or OA or a derivative thereof, or a pathway that reduces byproduct formation, are present in are in separate expression vectors or constructs. In some embodiments, one, two, three, four, or more nucleic acid sequences that encode an enzyme or other polypeptide that functions in a pathway for producing a cannabinoid or OA or a derivative thereof, or a pathway that reduces byproduct formation, are integrated into a chromosome or episome using an RNA-guided nuclease such as a CRISPR RNA-guided nuclease. Multiple genes encoding enzymes can be inserted into the host chromosome or episome individually, for example, sequentially, or multiple genes may be in inserted into the host chromosome or episome together.

[0222] Promoters used for driving transcription of genes in S. cerevisiae and other yeasts are well known in the art and include DNA elements that are regulated by glucose concentration in the growth media, such as the alcohol dehydrogenase-2 (ADH2) promoter. Other regulated promoters or inducible promoters, such as those that drive expression of the GAL1, MET25 and CUP1 genes, are used when conditional expression is required. GAL1 and CUP1 are induced by galactose and copper, respectively, whereas MET25 is induced by the absence of methionine. In some embodiments, one or more of the exogenous polynucleotides is operably linked to a glucose regulated promoter. In some embodiments, expression of one or more of the exogenous polynucleotides is driven by an alcohol dehydrogenase-2 promoter. Other promoters drive strongly transcription in a constitutive manner. Such promoters include, without limitation, the control elements for highly expressed yeast glycolytic enzymes, such as glyceraldehyde-3-phosphate dehydrogenase (GPD), phosphoglycerate kinase (PGK), pyruvate kinase (PYK), triose phosphate isomerase (TPI) and alcohol dehydrogenase-1 (ADH1). Another strong constitutive promoter that may be used is that from the S. cerevisiae transcription elongation factor EF-1 alpha gene (TEF1) (Partow et al., Yeast. 2010, (11):955-64). Promoters for engineering of bacterial hosts are well-known in the art and include inducible promoters such as example, the ara, lac, trc, tet, and cumate-regulated promoters.

[0223] In the above embodiments, the nucleic acid sequences may optionally be chemically synthesized genes, with codon optimization for the host being genetically engineered, that encode a wild type or mutant enzyme from another species or the host species.

[0224] Engineering of a host cells as provided herein can include expressing a variant of a naturally-occurring enzyme in the host cell. For making variants, mutagenesis methods are well known in the art and include, for example, error-prone PCR (Leung et al. (1989) Technique 1:11-15; and Caldwell et al. (1992) PCR Methods Applic. 2:28-33), oligonucleotide directed mutagenesis (Reidhaar-Olson et al. (1988) Science 241:53-57), assembly PCR (U.S. Pat. No. 5,965,408), and sexual PCR mutagenesis (Stemmer (1994) PNAS, USA 91:10747-10751. Cassette mutagenesis can be used to generate mutant proteins (Richards, J. H. (1986) Nature 323:187; Ecker et al. (1987) J. Biol. Chem. 262:3524-3527); to insert or replace individual codons (Kegler-Ebo et al. (1994) Nucleic Acids Res. 22(9):1593-1599), or to make variants of sequences comprising regulatory sequences (e.g., ribosome binding sites, see, e.g., Barrick et al. (1994) Nucleic Acids Res. 22(7):1287-1295); Wilson et al. (1994) Biotechniques 17:944-953). Recursive ensemble mutagenesis (Arkin et al. (1992) PNAS, USA 89:7811-7815) or exponential ensemble mutagenesis (Delegrave et al. (1993) Biotech. Res. 11:1548-1552) can also be used to generate nucleotide sequence variants. Random and site-directed mutagenesis can also be used (Arnold (1993) Curr. Opin. Biotech. 4:450-455).

[0225] Variants of enzymes of interest can also be created by in vivo mutagenesis. In some embodiments, random mutations in a nucleic acid sequence are generated by propagating the polynucleotide sequence in a bacterial strain, such as an E. coli strain, which carries mutations in one or more of the DNA repair pathways. Such “mutator” strains have a higher random mutation rate than that of a wild-type strain. Propagating a DNA sequence in one of these strains will eventually generate random mutations within the DNA. Mutator strains suitable for use for in vivo mutagenesis are described in, for example, PCT International Publication No. WO 91/16427. Standard methods of in vivo mutagenesis can be used. For example, host cells, comprising one or more polynucleotide sequences that include an open reading frame for an ACC polypeptide, as well as operably-linked regulatory sequences, can be subject to mutagenesis via exposure to radiation (e.g., UV light or X-rays) or exposure to chemicals (e.g., ethylating agents, alkylating agents, or nucleic acid analogs). In some host cell types, for example, bacteria, yeast, and plants, transposable elements can also be used for in vivo mutagenesis.

[0226] The cannabinoid-producing engineered cells of the invention may be made by transforming a host cell, either through genomic integration or using episomal plasmids (also referred to as expression vectors, or simply vectors) with at least one nucleotide sequence encoding enzymes involved in the engineered metabolic pathways. As used herein the term “nucleotide sequence” and “nucleic acid sequence” are used interchangeably and mean a polymer of RNA or DNA, single- or double-stranded, optionally containing synthetic, non-natural or altered nucleotide bases. A nucleotide sequence may comprise one or more segments of cDNA, genomic DNA, synthetic DNA, or RNA. In some embodiments, the nucleotide sequence is codon-optimized to reflect the typical codon usage of the host cell without altering the polypeptide encoded by the nucleotide sequence. In certain embodiments, the term “codon optimization” or “codon-optimized” refers to modifying the codon content of a nucleic acid sequence without modifying the sequence of the polypeptide encoded by the nucleic acid to optimize expression in a particular host cell. For example, genes for any of the polypeptides described with reference to the SEQ ID NOs described herein can be codon optimed for expression in a desired host cell.

[0227] Methods of introducing exogenous nucleic acids into plant cells are also well known in the art. Such plant cells are considered “transformed.” Suitable methods may include viral infection (such as double stranded DNA viruses), transfection, conjugation, protoplast fusion, electroporation, particle gun technology, calcium phosphate precipitation, direct microinjection, silicon carbide whiskers technology, Agrobacterium-mediated transformation, CRISPR/Cas9-mediated genome editing, and the like. The choice of method is generally dependent on the type of cell being transformed and the circumstances under which the transformation is taking place (e.g., in vitro, ex vivo, or in vivo).

[0228] In other aspects, engineering may be employed to reduce the production of byproducts, e.g., ethanol that utilize carbon sources that lead to reduced utilization of that carbon source for cannabinoid production. Such genes may be completely “knocked out” of the genome by deletion, or may be reduced in activity through reduction of promoter strength or the like. Such genes include those for the enzymes alcohol dehydrogenase and lactate dehydrogenase, for example.

[0229] Given the teachings and guidance provided herein, those skilled in the art will understand that enzymatic activity or expression can be attenuated using well known methods. Reduction of the activity or amount of an enzyme can mimic complete disruption of a gene if the reduction causes activity of the enzyme to fall below a critical level that is normally required for a pathway to function. Reduction of enzymatic activity by various techniques rather than use of a gene disruption can be important for an organism's viability. Methods of reducing enzymatic activity that result in similar or identical effects of a gene disruption include, but are not limited to: reducing gene transcription or translation; destabilizing mRNA, protein or catalytic RNA; and mutating a gene that affects enzyme activity or kinetics (see Sambrook et al., Molecular Cloning: A Laboratory Manual, Third Ed., Cold Spring Harbor Laboratory, New York (2001); and Ausubel et al., Current Protocols in Molecular Biology, John Wiley and Sons, Baltimore, Md. (1999). Natural or imposed regulatory controls can also accomplish enzyme attenuation including: promoter replacement (see Wang et al., Mol. Biotechnol. 52(2):300-308 (2012)); loss or alteration of transcription factors (Dietrick et al., Annu. Rev. Biochem. 79:563-590 (2010); and Simicevic et al., Mol. Biosyst. 6(3):462-468 (2010)); introduction of inhibitory RNAs or peptides such as siRNA, antisense RNA, RNA or peptide/small-molecule binding aptamers, ribozymes, aptazymes and riboswitches (Wieland et al., Methods 56(3):351-357 (2012); O'Sullivan, Anal. Bioanal. Chem. 372(1):44-48 (2002); and Lee et al., Curr. Opin. Biotechnol. 14(5):505-511 (2003)); and addition of drugs or other chemicals that reduce or disrupt enzymatic activity such as an enzyme inhibitor, an antibiotic or a target-specific drug.

[0230] One skilled in the art will also understand and recognize that attenuation of an enzyme can be done at various levels. For example, at the gene level, a mutation causing a partial or complete null phenotype, such as a gene disruption or a mutation causing epistatic genetic effects that mask the activity of a gene product (Miko, Nature Education 1(1) (2008)), can be used to attenuate an enzyme. At the gene expression level, methods for attenuation include: coupling transcription to an endogenous or exogenous inducer such as isopropylthio-β-galactoside (IPTG), then adding low amounts of inducer or no inducer during the production phase (Donovan et al., J. Ind. Microbiol. 16(3):145-154 (1996); and Hansen et al., Curr. Microbiol. 36(6):341-347 (1998)); introducing or modifying a positive or a negative regulator of a gene; modify histone acetylation/deacetylation in region in a eukaryotic chromosomal region where a gene is integrated (Yang et al., Curr. Opin. Genet. Dev. 13(2):143-153 (2003) and Kurdistani et al., Nat. Rev. Mol. Cell Biol. 4(4):276-284 (2003)); introducing a transposition to disrupt a promoter or a regulatory gene (Bleykasten-Brosshans et al., C. R. Biol. 33(8-9):679-686 (2011); and McCue et al., PLoS Genet. 8(2):e1002474 (2012)); flipping the orientation of a transposable element or promoter region so as to modulate gene expression of an adjacent gene (Wang et al., Genetics 120(4):875-885 (1988); Hayes, Annu. Rev. Genet. 37:3-29 (2003); in a diploid organism, deleting one allele resulting in loss of heterozygosity (Daigaku et al., Mutation Research/Fundamental and Molecular Mechanisms of Mutagenesis 600(1-2)177-183 (2006)); introducing nucleic acids that increase RNA degradation (Houseley et al., Cell, 136(4):763-776 (2009); or in bacteria, for example, introduction of a transfer-messenger RNA (tmRNA) tag, which can lead to RNA degradation and ribosomal stalling (Sunohara et al., RNA 10(3):378-386 (2004); and Sunohara et al., J. Biol. Chem. 279:15368-15375 (2004)). At the translational level, attenuation can include: introducing rare codons to limit translation (Angov, Biotechnol. J. 6(6):650-659 (2011)); introducing RNA interference molecules that block translation (Castel et al., Nat. Rev. Genet. 14(2):100-112 (2013); and Kawasaki et al., Curr. Opin. Mol. Ther. 7(2):125-131 (2005); modifying regions outside the coding sequence, such as introducing secondary structure into an untranslated region (UTR) to block translation or reduce efficiency of translation (Ringnér et al., PLoS Comput. Biol. 1(7):e72 (2005)); adding RNAase sites for rapid transcript degradation (Pasquinelli, Nat. Rev. Genet. 13(4):271-282 (2012); and Arraiano et al., FEMS Microbiol. Rev. 34(5):883-932 (2010); introducing antisense RNA oligomers or antisense transcripts (Nashizawa et al., Front. Biosci. 17:938-958 (2012)); introducing RNA or peptide aptamers, ribozymes, aptazymes, riboswitches (Wieland et al., Methods 56(3):351-357 (2012); O'Sullivan, Anal. Bioanal. Chem. 372(1):44-48 (2002); and Lee et al., Curr. Opin. Biotechnol. 14(5):505-511 (2003)); or introducing translational regulatory elements involving RNA structure that can prevent or reduce translation that can be controlled by the presence or absence of small molecules (Araujo et al., Comparative and Functional Genomics, Article ID 475731, 8 pages (2012). At the level of enzyme localization and/or longevity, enzyme attenuation can include: adding a degradation tag for faster protein turnover (Hochstrasser, Annual Rev. Genet. 30:405-439 (1996); and Yuan et al., PLoS One 8(4):e62529 (2013)); or adding a localization tag that results in the enzyme being secreted or localized to a subcellular compartment in a eukaryotic cell, where the enzyme would not be able to react with its normal substrate Nakai et al. Genomics 14(4):897-911 (1992); and Russell et al., J. Bact. 189(21)7581-7585 (2007)). At the level of post-translational regulation, enzyme attenuation can include: increasing intracellular concentration of known inhibitors; or modifying post-translational modified sites (Mann et al., Nature Biotech. 21:255-261 (2003)). At the level of enzyme activity, enzyme attenuation can include: adding an endogenous or an exogenous inhibitor, such as an enzyme inhibitor, an antibiotic, or a target-specific drug, to reduce enzyme activity; limiting availability of essential cofactors, such as vitamin B12, for an enzyme that requires the cofactor; chelating a metal ion that is required for enzyme activity; or introducing a dominant negative mutation. The applicability of a technique for attenuation described above can depend upon whether a given host microbial organism is prokaryotic or eukaryotic, and it is understood that a determination of what is the appropriate technique for a given host can be readily made by one skilled in the art.

[0231] A CRISPR/Cas9 (or other RNA-guided endonuclease) system can be used to generate a transgenic (genetically modified) microorganism or plant cell of the present disclosure, including generating regulatory mutants (e.g., “knockdown” or decreased expression of endogenous genes) and knockout mutations. CRISPR/Cas9 and other CRISPR systems and methods for mutating promoters, causing insertions in the upstream regions of genes that negatively affect gene expression, and disrupting genes are also known in the art. See, e.g., Bortesi and Fischer (2015) Biotechnol. Advances 33:41; Fan et al. (2015) Sci. Reports 5:12217; Ajjawi et al. (2017) Nature Biotech 35:647-652.

[0232] Fermentation

[0233] In yet another aspect, methods for producing a cannabinoid, or precursor as described herein, that include incubating a culture of an engineered host cell as provided herein to produce the cannabinoid or precursor. The methods can further include recovering the cannabinoid from the cells, the culture medium, or whole culture.

[0234] The cultures comprise cells engineered for the production of cannabinoids in a culture medium. In various embodiments the engineered host cells can be bacterial, fungal, or algal cells, including cyanobacterial and eukaryotic microalgal cells. In embodiments where the cells are heterotrophic cells, the culture medium includes at least one carbon source that is also an energy source. The culture medium can include one, two, three, or more carbon sources that are not primary energy sources. Nonlimiting examples of feed molecules that can be included in the culture medium include acetate, malonate, oxaloacetate, aspartate, glutamate, beta-alanine, alpha-alanine, hexanoate, hexanol, prenol, isoprenol, and geraniol. Further examples of compounds that can be provided in the culture medium include, without limitation, biotin, thiamine, pantotheine, and 4-phosphopantetheine.

[0235] In some embodiments, acetate is provided in the culture medium. In some embodiment, acetate and hexanoate are provided in the culture medium. In some embodiments, malonate and hexanoate are provided in the culture medium. In either of these embodiments, the culture medium can further include prenol, isoprenol, or geraniol. In some embodiments, aspartate, hexanoate, and prenol, isoprenol, or geraniol are present in the culture medium.

[0236] Depending on the desired microorganism or strain to be used, the appropriate culture medium may be used. For example, descriptions of various culture media may be found in “Manual of Methods for General Bacteriology” of the American Society for Bacteriology (Washington D.C., USA, 1981). As used here, culture medium, or simply “medium” as it relates to the growth source refers to the starting medium be it in a solid or liquid form. “Cultured medium”, on the other hand and as used here refers to medium (e.g. liquid medium) containing microbes that have been fermentatively grown and can include other cellular biomass. The medium generally includes one or more carbon sources, nitrogen sources, inorganic salts, vitamins and/or trace elements. “Whole culture” as used herein refers to cultured cells plus the culture medium they are cultured in.

[0237] Exemplary carbon sources include sugar carbons such as sucrose, glucose, galactose, fructose, mannose, isomaltose, xylose, maltose, arabinose, cellobiose and 3-, 4-, or 5-oligomers thereof. Other carbon sources include carbon sources such as methanol, ethanol, glycerol, formate and fatty acids. Still other carbon sources include carbon sources from gas such as synthesis gas, waste gas, methane, CO, CO2 and any mixture of CO, CO2 with H2. Other carbon sources can include renewal feedstocks and biomass. Exemplary renewal feedstocks include cellulosic biomass, hemicellulosic biomass and lignin feedstocks.

[0238] In some embodiments, culture conditions include aerobic, microaerobic, anaerobic or substantially anaerobic growth or maintenance conditions. Exemplary aerobic, microaerobic, and anaerobic conditions have been described previously and are well known in the art. Exemplary anaerobic conditions for fermentation processes are disclosed, for example, in U.S. Patent Application Publication No 2009/0047719, filed Aug. 10, 2007. Any of these conditions can be employed with the microbial organisms as well as other anaerobic conditions well known in the art.

[0239] The culture conditions can include, for example, liquid culture procedures as well as fermentation and other large scale culture procedures. Useful yields of the products can be obtained under aerobic, microaerobic, anaerobic or substantially anaerobic culture conditions.

[0240] Algae can be cultured photoautotrophically, in the light, without a reduced carbon source that can be used for energy, mixotrophically, where the algae are exposed to light that allows photosynthesis and also use a reduced carbon source provided in the culture medium, or heterotrophically, in the dark, where the cells rely entirely on a reduced carbon source provided in the culture medium for growth and energy.

[0241] An exemplary growth condition for achieving, one or more cannabinoid product(s) includes aerobic, microaerobic, anaerobic culture or fermentation conditions. In certain embodiments, the microbial organism can be sustained, cultured or fermented under aerobic, microaerobic, anaerobic or substantially anaerobic conditions. Briefly, anaerobic conditions refer to an environment devoid of oxygen. Conditions include, for example, a culture, batch fermentation or continuous fermentation such that the dissolved oxygen concentration in the medium remains between 0 and 10% of saturation, or higher. Substantially anaerobic conditions also include growing or resting cells in liquid medium or on solid agar inside a sealed chamber maintained with an atmosphere of less than 1% oxygen. The percent of oxygen can be maintained by, for example, sparging the culture with an N2/CO2 mixture or other suitable non-oxygen gas or gases.

[0242] The culture conditions can be scaled up and grown continuously for manufacturing cannabinoid product. Exemplary growth procedures include, for example, fed-batch fermentation and batch separation; fed-batch fermentation and continuous separation, or continuous fermentation and continuous separation. All of these processes are well known in the art. Fermentation procedures are particularly useful for the biosynthetic production of commercial quantities of cannabinoid product. Generally, and as with non-continuous culture procedures, the continuous and/or near-continuous production of cannabinoid product will include culturing a cannabinoid producing organism on sufficient nutrients and medium to sustain and/or nearly sustain growth in an exponential phase. Continuous culture under such conditions can include, for example, 1 day, 2, 3, 4, 5, 6 or 7 days or more. Additionally, continuous culture can include 1 week, 2, 3, 4 or 5 or more weeks and up to several months. Alternatively, the desired microorganism can be cultured for hours, if suitable for a particular application. It is to be understood that the continuous and/or near-continuous culture conditions also can include all time intervals in between these exemplary periods. It is further understood that the time of culturing the microbial organism is for a sufficient period of time to produce a sufficient amount of product for a desired purpose.

[0243] Fermentation procedures are well known in the art. Briefly, fermentation for the biosynthetic production of cannabinoid product can be utilized in, for example, fed-batch fermentation and batch separation; fed-batch fermentation and continuous separation, or continuous fermentation and continuous separation. Examples of batch and continuous fermentation procedures are well known in the art. Typically cells are grown at a temperature in the range of about 25° C. to about 40° C. in an appropriate medium, as well as up to 70° C. for thermophilic microorganisms.

[0244] The culture medium may include a feed molecule that is converted into a cannabinoid precursor, such as, but not limited to, CO₂, acetate, malonate, beta-alanine, aspartate, glutamate, oxaloacetate, hexanoate, hexanol, prenol, isoprenol, or geraniol. The feed molecule can also serve as the main or a supplemental carbon source for cell growth and energy, or can be provided in addition to a sugar, sugar alcohol, polyol, or organic acid that is provided for growth and energy. Additional supplements can optionally include biotin, thiamine, pantothenate, and/or 4′-phosphopantotheine.

[0245] The culture medium at the start of fermentation may have a pH of about 4 to about 7. The pH may be less than 11, less than 10, less than 9, or less than 8. In other embodiments the pH may be at least 2, at least 3, at least 4, at least 5, at least 6, or at least 7. In other embodiments, the pH of the medium may be about 6 to about 9.5; 6 to about 9, about 6 to 8 or about 8 to 9.

[0246] Exemplary fermentation processes include, but are not limited to, fed-batch fermentation and batch separation; fed-batch fermentation and continuous separation; and continuous fermentation and continuous separation. In an exemplary batch fermentation protocol, the production organism is grown in a suitably sized bioreactor sparged with an appropriate gas. Under anaerobic conditions, the culture is sparged with an inert gas or combination of gases, for example, nitrogen, N₂/CO₂ mixture, argon, helium, and the like. As the cells grow and utilize the carbon source, additional carbon source(s) and/or other nutrients are fed into the bioreactor at a rate approximately balancing consumption of the carbon source and/or nutrients. The temperature of the bioreactor is maintained at a desired temperature, generally in the range of 22-37 degrees C., but the temperature can be maintained at a higher or lower temperature depending on the growth characteristics of the production organism and/or desired conditions for the fermentation process. Growth continues for a desired period of time to achieve desired characteristics of the culture in the fermenter, for example, cell density, product concentration, and the like. In a batch fermentation process, the time period for the fermentation is generally in the range of several hours to several days, for example, 8 to 24 hours, or 1, 2, 3, 4 or 5 days, or up to a week, depending on the desired culture conditions. The pH can be controlled or not, as desired, in which case a culture in which pH is not controlled will typically decrease to pH 3-6 by the end of the run. Upon completion of the cultivation period, the fermenter contents can be passed through a cell separation unit, for example, a centrifuge, filtration unit, and the like, to remove cells and cell debris. In the case where the desired product is expressed intracellularly, the cells can be lysed or disrupted enzymatically or chemically prior to or after separation of cells from the fermentation broth, as desired, in order to release additional product. The fermentation broth can be transferred to a product separations unit. Isolation of product occurs by standard separations procedures employed in the art to separate a desired product from dilute aqueous solutions. Such methods include, but are not limited to, liquid-liquid extraction using a water immiscible organic solvent (e.g., toluene or other suitable solvents, including but not limited to diethyl ether, ethyl acetate, tetrahydrofuran (THF), methylene chloride, chloroform, benzene, pentane, hexane, heptane, petroleum ether, methyl tertiary butyl ether (MTBE), dioxane, and the like) to provide an organic solution of the product, if appropriate, standard distillation methods, and the like, depending on the chemical characteristics of the product of the fermentation process.

[0247] In an exemplary fully continuous fermentation protocol, the production organism is generally first grown up in batch mode in order to achieve a desired cell density. When the carbon source and/or other nutrients are exhausted, feed medium of the same composition is supplied continuously at a desired rate, and fermentation liquid is withdrawn at the same rate. Under such conditions, the product concentration in the bioreactor generally remains constant, as well as the cell density. The temperature of the fermenter is maintained at a desired temperature, as discussed above. During the continuous fermentation phase, it is generally desirable to maintain a suitable pH range for optimized production. The pH can be monitored and maintained using routine methods, including the addition of suitable acids or bases to maintain a desired pH range. The bioreactor is operated continuously for extended periods of time, generally at least one week to several weeks and up to one month, or longer, as appropriate and desired. The fermentation liquid and/or culture is monitored periodically, including sampling up to every day, as desired, to assure consistency of product concentration and/or cell density. In continuous mode, fermenter contents are constantly removed as new feed medium is supplied. The exit stream, containing cells, medium, and product, are generally subjected to a continuous product separations procedure, with or without removing cells and cell debris, as desired. Continuous separations methods employed in the art can be used to separate the product from dilute aqueous solutions, including but not limited to continuous liquid-liquid extraction using a water immiscible organic solvent (e.g., toluene or other suitable solvents, including but not limited to diethyl ether, ethyl acetate, tetrahydrofuran (THF), methylene chloride, chloroform, benzene, pentane, hexane, heptane, petroleum ether, methyl tertiary butyl ether (MTBE), dioxane, and the like), standard continuous distillation methods, and the like, or other methods well known in the art.

[0248] Suitable purification and/or assays to test, e.g., a cannabinoid can be performed using well known methods. For example, product and byproduct formation in the engineered production host can be monitored. The final product and intermediates, and other organic compounds, can be analyzed by methods such as HPLC (High Performance Liquid Chromatography), GC-MS (Gas Chromatography-Mass Spectroscopy) and LC-MS (Liquid Chromatography-Mass Spectroscopy) or other suitable analytical methods using routine procedures well known in the art. The release of product in the fermentation broth can also be tested with the culture supernatant. Byproducts and residual glucose can be quantified by HPLC using, for example, a refractive index detector for glucose and alcohols, and a UV detector for organic acids (Lin et al., Biotechnol. Bioeng. 90:775-779 (2005)), or other suitable assay and detection methods well known in the art. The individual enzyme or protein activities from the exogenous DNA sequences can also be assayed using methods well known in the art.

[0249] Cannabinoids can be separated from other components in the culture using a variety of methods well known in the art. Such separation methods include, for example, extraction procedures as well as methods that include liquid-liquid extraction, pervaporation, evaporation, filtration, membrane filtration (including reverse osmosis, nanofiltration, ultrafiltration, and microfiltration), membrane filtration with diafiltration, membrane separation, reverse osmosis, electrodialysis, distillation, extractive distillation, reactive distillation, azeotropic distillation, crystallization and recrystallization, centrifugation, extractive filtration, ion exchange chromatography, size exclusion chromatography, adsorption chromatography, carbon adsorption, hydrogenation, and ultrafiltration. For example, the amount of cannabinoid or other product(s), including a polyketide, produced in a bio-production media generally can be determined using any of methods such as, for example, high performance liquid chromatography (HPLC), gas chromatography (GC), GC/Mass Spectroscopy (MS), or spectrometry. All of the above methods are well known in the art.

[0250] The disclosure also provides compositions that are enriched for desired cannabinoids, analogs, and derivatives thereof, for example, CBGA, THCV, THCVA, CBDV, CBDVA, CBN, CBNA, CBD, CBDA, CBC, CBCA, CBGV, CBGVA, CBG, CBCV, CBCVA, THC, THCA, analogs, or derivatives thereof, or combinations thereof are disclosed herein. Such enriched compositions include those that are pharmaceutical compositions as well as those that are used for non-pharmaceutical purposes, including medicinal purposes. Accordingly, in some embodiments, provided are compositions, such as pharmaceutical compositions or medicinal compositions, with CBGA and/or CBG that are 90% or greater, 91% or greater, 92% or greater, 93% or greater, 94% or greater, 95% or greater, 96% or greater, 97% or greater, 98% or greater, 99% or greater, 99.2% or greater, 99.4% or greater, 99.5% or greater, 99.6% or greater, 99.7% or greater, 99.8% or greater, 99.9% or greater, 99.95% or greater or even 100% CBGA or its decarboxylated derivative CBG, and cannabinoid compounds.

[0251] In some embodiments, culture conditions include anaerobic or substantially anaerobic growth or maintenance conditions. Exemplary anaerobic conditions have been described previously and are well known in the art. Exemplary anaerobic conditions for fermentation processes are described herein and are described, for example, in U.S. publication 2009/0047719, filed Aug. 10, 2007. Any of these conditions can be employed with the non-naturally occurring microbial organisms as well as other anaerobic conditions well known in the art.

[0252] Purification and Analysis

[0253] Suitable purification and/or assays to test, e.g., for the production of any cannabinoid (e.g., CBGA) or metabolic intermediate or precursor can be performed using well known methods. Suitable replicates such as triplicate cultures can be grown for each engineered strain to be tested. For example, product and byproduct formation in the engineered production host can be monitored. The final product and intermediates, and other organic compounds, can be analyzed by methods such as HPLC (High Performance Liquid Chromatography), GC-MS (Gas Chromatography-Mass Spectroscopy) and LC-MS (Liquid Chromatography-Mass Spectroscopy) or other suitable analytical methods using routine procedures well known in the art. The release of product in the fermentation broth can also be tested with the culture supernatant. Byproducts and residual glucose can be quantified by HPLC using, for example, a refractive index detector for glucose and alcohols, and a UV detector for organic acids (Lin et al., Biotechnol. Bioeng. 90:775-779 (2005)), or other suitable assay and detection methods well known in the art. The individual enzyme or protein activities from the exogenous DNA sequences can also be assayed using methods well known in the art.

[0254] CBGA or other target molecules may be separated from other components in the culture using a variety of methods well known in the art. Such separation methods include, for example, extraction procedures as well as methods that include continuous liquid-liquid extraction, pervaporation, evaporation, filtration, membrane filtration (including reverse osmosis, nanofiltration, ultrafiltration, and microfiltration), membrane filtration with diafiltration, membrane separation, reverse osmosis, electrodialysis, distillation, extractive distillation, reactive distillation, azeotropic distillation, crystallization and recrystallization, centrifugation, extractive filtration, ion exchange chromatography, size exclusion chromatography, adsorption chromatography, carbon adsorption, hydrogenation, and ultrafiltration. All of the above methods are well known in the art.

### Example 1—Plasmid Construction, Strain Modification, Production of Olivetolic Acid and CBGA in E. coli, and Analytical Methods for Detecting Cannabinoids

[0255] Plasmid Construction

[0256] Pathway gene plasmid. pZ vector (Novagen) was used to clone acetyl-CoA carboxylase genes, prenyltransferase genes, biotin ligases, olivetol synthase, olivetolic acid cyclase, genes under control of a constitutive or inducible promoter. Gene fragments were directly synthesized and assembled with the vector backbone with Golden Gate Assembly (New England Biolabs, MA, USA) or Gibson Assembly® (New England Biolabs, MA, USA).

[0257] pRed_Cas9 plasmid. The Cas9 gene from Streptococcus pyogenes, lambda red components from bacteriophage lambda, pSC101 temperature sensitive origin of replication, arabinose operon, and β-lactamase gene were assembled into a single plasmid with golden gate assembly method. Lambda red components were driven by an arabinose-inducible promoter pBAD and Cas9 gene was under control of a rhamnose-inducible promoter.

[0258] pGuide plasmid. A pair of 20 nt oligos were designed to target genomic locus for editing. Complementary oligos with overhangs were ordered from IDT and annealed to generate N20 part. gRNA without its N20 (5′-GTTTTAGAGCTAGAAATAGCAAGT TAAAATAAGGCTAGTCCGTTATCAACTTGAAAAAGTGGCACCGAGTCGGTGCTT-3′) (SEQ ID NO: 201) and its promoter were directly synthesized and assembled with a sacBK cassette into a pZE vector to generate a base plasmid for cloning N20 part. The base plasmid was digested with restriction enzyme BsaI and assembled with N20 with a Golden Gate Assembly reaction. DNA editing templates containing a homology arm of 50-500 bp to the target genome locus were PCR-amplified with KOD polymerase (NEB) or directly synthesized.

[0259] Strain Modification

[0260] Gene deletions and insertions were carried out using CRISPR editing. Escherichia coli strain was grown in 30 mL LB at 30° C. to an OD600 of 0.6 and then made electrocompetent by concentrating 100-fold and washing three times with ice-cold water or glycerol. 10-50 ng of pRed_Cas9 plasmid was used for electroporation, shocked cells were added to 0.5 mL LB, incubated 1 h at 30° C., and then plated on LB petri dishes carrying carbenicillin antibiotics. A single colony was inoculated to a 15 ml falcon tube in LB+100 mg/L carbenicillin for an overnight cultivation at 30° C., rpm 225. The seed culture was then inoculated to a 250 ml flask in 30 ml LB+2% (w/v) arabinose+0.2% (w/v) rhamnose+carb to an OD₆₀₀ of 0.6 to make electrocompenent cells. 50-100 ng of guide plasmid and 100-500 ng editing templates were used for electroporation. The resulted strains were grown in LB+carb+0.2% rhamnose for 1-4 h. The culture was plated on LB+100 mg/L carbenicillin+50 mg/L kanamycin+0.2% rhamnose agar plates, and the colonies were analyzed by colony PCR with a forward primer upstream of the left homology arm and a reverse primer downstream of the right homology arm. Colonies with expected PCR product were subjected to verification by DNA sequencing for further confirmation. At last, the temperature sensitive pRed_Cas9 plasmid and sacBK-containing guide plasmid were cured by growing the edited strains on LB+10% sucrose liquid medium or agar plates 37° C. overnight.

[0261] OLA Production in Escherichia coli

[0262] To test OLA production in Escherichia coli, strains comprising olivetol synthase, olivetolic acid cyclase genes were inoculated to multi-well plates or flasks containing LB supplemented with 1% glycerol and appropriate concentrations of antibiotics. After 16 hours of cultivation at 30°, the cells were transferred to fresh medium with a starting OD of 1.2 and cultivated for 5 h at 30° C. to reach an OD of 2.0-5.0. The cultures were then spun down and resuspended in minimal medium supplemented with 4% glycerol, 2% casAA, 100 μM biotin, and appropriate concentrations of antibiotics with a starting OD600 of 0.05. After 19 hours of cultivation at 30° C., the seed culture was spun down and resuspended in minimal medium supplemented with 4% glycerol, 2% casAA, 100 uM biotin, 1 mg/L thiamine, and 4 mM hexanoic acid to reach a starting OD600 of 0.5-5.0. The resulted cultures were inoculated to a multi-well plate to grow for 24 h at 30° C., 600 rpm. At the end of the cultivation, 20 μl of each culture was diluted in 180 μl culture medium to measure its optical density using a 96-well transparent flat-bottomed microplate. The remaining cell cultures were centrifuged for 20 minutes at 4,000×g, and 100 μL of each supernatant was transferred to a 96-well plate for analytical quantification of OLA, OL, PDAL, and hexanoic acid.

[0263] CBGA Production in Escherichia coli

[0264] To test CBGA production in Escherichia coli strains comprising olivetol synthase, olivetolic acid cyclase, prenyltransferase genes, genes encoding non-MVA, non-MEP pathway enzymes, were inoculated to multi-well plates or flasks containing LB supplemented with 1% glycerol and appropriate concentrations of antibiotics. After 16 hours of cultivation at 30° C., the cells were transferred to fresh medium with a starting OD of 1.2 and cultivated for 5 h at 30° C. to reach an OD of 2.0-5.0. The cultures were then spun down and resuspended in minimal medium supplemented with 4% glycerol, 2% casAA, and appropriate concentrations of antibiotics with a starting OD of 0.05. After 19 hours of cultivation at 30° C., the seed cultures were spun down and resuspended in minimal medium supplemented with 4% glycerol, 2% casAA, 20 mM prenol or isoprenol, 4 mM hexanoic acid or 400 uM OLA to obtain a starting OD of 0.5-5.0. The resulted cultures were inoculated to a multi-well plate to grow for 24-48 h at 30° C., 600 rpm. In some examples, 20 mM prenol or isoprenol was spiked in during the cultivation. At the end of the cultivation, 20 μl of each culture was diluted in 180 ul culture medium to measure its optical density using a 96-well transparent flat-bottomed microplate. 100 ul of the remaining cell cultures were treated with 900 μl acetonitrile and centrifuged. Supernatant was transferred to a multi-well plate for subsequent LCMS analysis of CBGA, OLA, OL, PDAL, prenol or isoprenol, and hexanoic acid.

[0265] Analytical Analysis of Cannabinoid Intermediates

[0266] Olivetol, PDAL, OLA, HTAL, CBGA and combinations thereof may be analyzed by LCMS or LCMS/MS methods using C18 reversed phase chromatography coupled to either Exactive (Thermofisher) or QTrap 4500 (Sciex) mass spectrometers.

[0267] In vitro enzymatic reactions, whether conducted in cell lysate or using purified proteins, can be first treated with 6 volumes of organic solvent (acetonitrile containing internal standards) to precipitate proteins, the supernatant can be recovered and further diluted for LCMS analysis, if necessary. For in vivo samples, cell cultures are spun down and supernatant can be directly used for LCMS analysis to quantify OLA, OL, and PDAL. For CBGA analysis, cell cultures are first treated with acetonitrile to solubilize CBGA.

[0268] Reversed phase LCMS may be used, and compounds can be identified by their LC retention times and MRM transitions specific to the compounds. LCMSMS analysis can be conducted on Shimadzu UHPLC system coupled with AB Sciex QTRAP4500 mass spectrometer. Agilent Eclipse XDB C18 column (4.6×3.0 mm, 1.8 um) may be used with a 1-min gradient elution at 1 mL/min using water containing 0.1% ammonia acetate as mobile phase A and 90% methanol containing 0.1% ammonia acetate as mobile phase B. The LC column temperature can be maintained at 45° C. Negative ionization mode can be used for all the analytes.

### Example 2—OLA Production Using Heterologous ACC Genes

[0269] ACC catalyzes the conversion of acetyl-CoA into Mal-CoA which is believed to be a rate-limiting reagent in the production of OLA and other downstream Mal-CoA products including CBGA

[0270] In order to investigate and compare the catalytic potential of ACC from a variety of species, including multi-subunit ACC proteins and multidomain acc proteins, heterologous acc genes were introduced into E. coli K-12 MG1655 strain comprising olivetol synthase, olivetolic acid cyclase, hexanoyl-CoA ligase genes as described in Example 1.

[0271] Acc A, B, C, D genes from Nocardia farcinica, Chloroflexus aurantiacus, and Corynebacterium glutamicum were cloned into pZ vector as described in Example 1. Similarly, multidomain Acc gene from Arabidopsis thaliana and Mucor circinelloides were cloned into pZ vectors as described in Example 1. E. coli strains comprising hexanoyl-CoA ligase, olivetol synthase, olivetolic acid cyclase genes were transformed with the pZ vectors comprising the Acc genes. The results are provided in Table 4 and demonstrate that certain heterologous ACC genes result in significantly greater OLA production when expressed in E. coli.

TABLE 4
OLA Production From Heterologous ACC Proteins In E. coli.

| | OLA Concentration |
|---|---|
| ACC Source | (μM) |
| E. coli K-12 MG1655 (bacterium) | 0.9 |
| Nocardia farcinica (bacterium) | 0.9 |
| Arabidopsis thaliana (plant) | 1.1 |
| Chloroflexus aurantiacus (bacterium) | 1.2 |
| Saccharomyces cerevisiae (fungus) | 1.2 |
| Corynebacterium glutamicum | 42.0 |
| (bacterium) | |
| Mucor circinelloides (fungus) | 132.0 |

### Example 3—Integration of Mucor circinelloides Gene into E. coli Genome

[0272] Mucor circinelloides multidomain acc gene was integrated into the hybC locus of the E. coli genome using CRISPR as described in Example 1. The Mucor circinelloides Acc gene was integrated into the E. coli genome using ACAATCATCCATGCATCGCG (SEQ ID NO: 202) and GTACACGTAGTGGATGCTGA (SEQ ID NO: 203) guide sequences.

### Example 4—FabF Deletion Increases OLA Production

[0273] Fatty acid biosynthetic (Fab) pathways consume a significant amount of intracellular Mal-CoA. The present experiment evaluates the effect of Fab blockade on OLA production. The FabF gene was deleted in two different E. coli strains comprising hexanoyl-CoA ligase, olivetol synthase, olivetolic acid cyclase genes: E. coli Kh-13560 and E. coli Kh-13526 using CRISPR as described in Example 1. The guide sequences used for fabF deletion were CCGCAATGATAACCCGCAAG (SEQ ID NO: 204) and CCGCTTGCGGGTTATCATTG (SEQ ID NO: 205).

[0274] The results are provided in Table 5 and demonstrate that OLA production is significantly increased in E. coli engineered to delete the FabF gene. E. coli Kh13526 had a higher basal level of OLA production (139.0 μM) versus the E. coli Kh13560 (24.7 μM). However, FabF gene deletion caused an increase in OLA production of about 2-3-fold.

TABLE 5
OLA Production In E. coli Having A FabF
Gene Deletion

| | OLA Concentration |
|---|---|
| ACC Source | (μM) |
| E. coli Kh-13560 | 24.7 |
| E. coli Kh-13560 ΔFabF | 58.3 |
| E. coli Kh-13526 | 139.0 |
| E. coli Kh-13526 ΔFabF | 320.0 |

### Example 5—Integration of Various Genes into E. coli Genome to Increase the Yield of Cannabinoid Production

[0275] Prenyltransferase, acc, olivetolic acid cyclase, olivetol synthase, thiM, ipk, idsA, idi, and fadD genes were integrated into E. coli genome using CRISPR as described in Example 1. Briefly, prenyltransferase gene was integrated into E. coli fadE locus, Mucor circinelloides multidomain acc gene was integrated into E. coli hybC locus, OAC gene into fhuA, fadB, and/or fadR loci, thiM was integrated into E. coli poxB locus, ipk was integrated into E. coli thiM locus, olivetol synthase was integrated into E. coli adhE locus, idsA was integrated into E. coli idhA locus, fadD into yahK locus.

### Example 6—Identification and Characterization of CBGA Transporters

[0276] CBGA transporters were identified and characterized in proprietary E. coli strain L20733. This strain comprises hexanoyl-CoA ligase, prenyltransferase, olivetolic acid cyclase, olivetol synthase, ipk, idi, idsA, and thiM.

[0277] Experiment #1: CBGA production was tested by culturing E. coli L20733 in the presence of OLA and prenol at different ODs. Two fermentation tanks inoculated with L20733 were run in batch mode with 2% glycerol and 10 g/L Cas amino acids mixed with a proprietary small scale media (SSMS). To one tank, 0.04 mM OLA and 20 mM prenol at ˜OD10 was added and the same amount of OLA and prenol was added to the second tank at ˜OD30.

[0278] Experiment #2: This experiment was similar to Experiment #1 except that different ratios of OLA and prenol were used at higher ODs. Again, two fermentation tanks were used in batch mode. The initial media contained 30 g/L glucose and proprietary fermentation media (FM23). The feed comprised 100 g/L glucose in FM23 media fed at 10 mL/hr. The two tanks received approximately 1 mM OLA and 6-9 mM prenol which was added to the first tank at ˜OD₆₀₀ of 30 and the second tank at ˜OD₆₀₀ of 50.

[0279] In both experiments, transcriptomics samples were taken two hours before and two hours after the OLA/prenol addition. Briefly, the samples were taken from the fermentation broth, RNA was isolated and cDNA libraries were prepared and sequenced using an Illumina MiSeq device. The resulting reads were aligned using Bowtie 2 software (John Hopkins University). The counts were calculated using htseq-counts software.

[0280] The results of Experiments #1 and #2 are shown in FIGS. 2 and 3. FIG. 2 demonstrates that the OLA/prenol “spike” and subsequent increase in CBGA production caused a significant increase in the expression of blc and certain members of the ybh operon. Culture #5117-1 received an OLA+ prenol spike at 22 hrs, and culture #5117-3 received an OLA+prenol spike at 42.5 hrs (after growing longer). The OLA+prenol spike activates CBGA production, and the results as shown in the graphs compares the expression of the genes before and after the spike. In particular, ybhC expression is strongly increased.

[0281] FIG. 3A identified three additional putative transporters whose expression was increased in response to the OLA/prenol spike: mlaD, mlaE, and mlaF. Cultures were grown to either OD₃₀ (dashed line) or OD₅₀ (solid line) and then provided with an OLA+ prenol feed. FIG. 3B illustrates some general parameters of the cultures following the OLA/prenol spike. For validation purposes, rapid spikes in the extracellular concentration of prenol and OLA were observed. The timing of these measured increases in OLA and prenol are indicated in FIG. 3A relative to the increased expression of malD, mlaE, and mlaF. As expected, the OLA/prenol spike did not cause a meaningful change in extracellular concentration of hexanoate despite significantly elevated CBGA production and oxygen utilization, and reduced growth rate.

### Example 7—fadR Deletion Increases OLA Production

[0282] FadR is a transcriptional regulator in E. coli fatty acid degradation pathway. It represses the transcription of E. coli β-oxidation genes, e.g., fadE, fadM, fadD, fadI, fadL genes. In addition, FadR upregulates fatty acid biosynthesis genes, e.g., accA, fabA, accB, accC, accD, fabB, fabH, fadD, fabG, fabD. The fadR gene was deleted in E. coli using CRISPR as described in Example 1 to increase the availability of malonyl CoA and thereby increase the production of OLA. The E. coli Strain 1 comprises OLS, OAC, prenyltransferase, thiM, fadD, Mucor circinelloides acc, and deletion of E. coli fadE genes. The E. coli Strain 2 comprises OLS, OAC, prenyltransferase, thiM, fadD, Mucor circinelloides acc, and deletion of E. coli fadE and fabF genes. The guide sequences used for fadR deletion were ATCGGGATGCTGACGAAACG (SEQ ID NO: 206) and CATTAAGGCGCAAAGCCCGG (SEQ ID NO: 207).

[0283] The deletion of fadR gene increases the OLA production (FIG. 8A).

### Example 8—FadE Deletion Increases OLA Production

[0284] The fadE gene was deleted in E. coli using CRISPR as described in Example 1. The E. coli strain comprising a pCDF plasmid overexpressing fadD and E. coli accABCD under an IPTG-inducible T7 promoter and a pET plasmid overexpressing OLS and OAC under a cumate-inducible promoter. Deletion of fadE resulted in an increase of OLA production by E. coli (FIG. 8B).

### Example 9—Production of CBGA in a Genetically Modified E. coli Strain

[0285] Strain 12482 comprises an integrated geranyl diphosphate synthase from Abies grandis (GenBank accession #: AAN01134.1) and strain 12558 comprises a Geranylgeranyl pyrophosphate synthase from Corynebacterium glutamicum (GenBank accession #: WP_011014931.1). Both strains were engineered to overexpress additional GPP pathway genes thiM, idi, and ipk, OLS, OAC, hexanoyl-CoA ligase. The strains further comprise a prenytransferase on a plasmid.

[0286] FIG. 4 shows the production of CBGA by the genetically modified E. coli strains.

### Example 10—Production of CBGA in a Genetically Modified E. coli Strain Comprising a Deletion of nudB Gene

[0287] E. coli strains comprising Mucor circinelloides acc, OLS, OAC, GPP pathway genes (thiM, IPK, idi, and idsA), prenyltransferase, deletion of fabF, fadE, fadR genes and were fed with 400 μM OLA and 20 mM prenol or isoprenol, and CBGA production was measured after 1 hr. Deletion of nudB gene increases the production of CBGA (FIG. 9).

[0288] The combinations set forth herein are not intended to be limiting. Any of the embodiments of modifications of engineered cells, culture compositions, and methods of producing a cannabinoid (e.g., CBGA) may be combined within the scope of the invention.

### Example 11—Downregulation of fabD Increases the Total OLA Pathway Flux

[0289] The in vivo assay procedure was performed as described in Example 1. The analytical method was performed as described in Example 1.

[0290] FabD is a malonyl CoA-acyl carrier protein transacylase that is involved in the fatty acid biosynthesis. The first committed step of fatty acid biosynthesis is the conversion of acetyl-CoA to malonyl-CoA by ACC gene(s) followed by the conversion of malonyl-CoA to malonyl-ACP through FabD. The protein expression of fabD was decreased by introducing mutations in its ribosomal binding site (RBS) sequence, and therefore, to increase the availability of malonyl CoA for the OLA pathway. The parental E. coli Strain 13883 comprises Mucor circinelloides ACC, fadD, OLS, OAC, and Wild Type fabD genes. The E. coli fabD strains FabD60, FabD24, FabD41, FabD46, FabD22, FabD12, FabD28, FabD30, FabD5, FabD1, FabD23, FabD13 comprises Mucor circinelloides ACC, fadD, OLS, OAC, and modified fabD genes. The modifications are in the fabD RBS sequence.

[0291] The results are presented in FIG. 11 showing downregulation of fabD on the total OLA pathway flux in E. coli strains comprising ACC, fabD, OLS, and OAC.

### Example 12: Proteomic Analysis of the Effect of Modifications at the fabD RBS on the Down Regulation of FabD Protein Expression

[0292] Strains L24075 and L24105 are genetically identical except that in L24105, nudB gene is deleted and the ribosomal binding site (RBS) of FabD is mutated to lower the expression of FabD. Samples were taken from small scale cultures comprising these strains after 24 hours of growth on 4.5 mM hexanoic acid, 24 hr. 0.1 mM biotin, 1 mg/L thiamine and glycerol in the presence or absence of 20 g/L of cas amino acid. Samples were then prepared for tandem mass tag proteomics and analyzed for on the signal of 7 detected peptides unique to fabD across all samples. The strain L24105 having the FabD RBS variation showed a nearly 3-fold drop in FabD protein signal indication the downregulation of FabD expression.

[0293] The results are presented in FIG. 12 showing the proteomic analysis of effect of FabD ribosomal binding site (RBS) variation on the expression of FabD.

### Example 13—Overexpression of MdtABC Sustains CBGA Production Rate

[0294] MdtABC is one of several multi-drug efflux transporter system from the RND family in E. coli. The three-component transporter (two transmembrane and one periplasmic domain) was overexpressed from a plasmid with a medium-strength constitutive promoter in a CBGA producing E. coli strain.

[0295] The in vivo assay procedure was performed as described in Example 1. The analytical method was performed as described in Example 1.

[0296] As shown in FIG. 13, in the parental CBGA producing strain CBGA production decreased over time. In contrast, when MdtABC was overexpressed CBGA production was sustained over the duration of the experiment. The results indicate that in the parental CBGA producing strain efflux of CBGA limits CBGA production, and the mdtABC efflux system is capable of exporting CBGA and thereby when overexpressed increases the production of CBGA.

[0297] The invention has been described broadly and generically herein. Each of the narrower species and subgeneric groupings falling within the generic disclosure also form part of the methods. This includes the generic description of the methods with a proviso or negative limitation removing any subject matter from the genus, regardless of whether or not the excised material is specifically recited herein.

[0298] Other embodiments are within the following claims. In addition, where features or aspects of the methods are described in terms of Markush groups, those skilled in the art will recognize that the invention is also thereby described in terms of any individual member or subgroup of members of the Markush group.

The application's sequence listing, which the Patent Office published only in electronic form, follows.

SEQUENCE LISTING (231 sequences)

SEQ ID NO: 1 - protein, 2216 aa, Mucor circinelloides f. circinelloides 1006PhL
MVEHRSLPGHFLGGNSLESAPQGPVKDFVQAHEGHTVISKVLIANNGMAAMKEIRSVRKWAYETFGNERAIEFTVMATPEDLKANAEYIRMADNFVEVPGGSNNNNYANVELIVDVAERTAVHAVWAGWGHASENPRLPEMLAKSKHKCLFIGPPASAMRSLGDKISSTIVAQSAQVPTMGWSGDGITETEFDAAGHVIVPDNAYNEACVKTAEQGLKAAEKIGFPVMIKASEGGGGKGIRMVKDGSNFAQLFAQVQGEIPGSPIFIMKLAGNARHLEVQLLADQYGNAISLFGRDCSVQRRHQKIIEEAPVTIAKPDVFEQMEKAAVRLGKLVGYVSAGTVEYLYSHHDDQFYFLELNPRLQVEHPTTEMVSGVNLPAAQLQIAMGIPLHRIRDIRVLYGVQPNSASEIDFGFEHPTSLTSHRRPTPKGHVIACRITAENPDAGFKPSSGIMQELNFRSSTNVWGYFSVVSAGGLHEYADSQFGHIFAYGENRQQARKNMVIALKELSIRADFRSTVEYIIRLLETPDFEENTINTGWLDMLISKKLTAERPDTMLAVFCGAVTKAHMASLDCFQQYKQSLEKGQVPSKGSLKTVFTVDFIYEEVRYNFTVTQSAPGIYTLYLNGTKTQVGIRDLSDGGLLISIDGKSHTTYSRDEVQATRMMVDGKTCLLEKESDPTQLRSPSPGKLVNLLVENGDHLNAGDAYAEIEVMKMYMPLIATEDGHVQFIKQAGATLEAGDIIGILSLDDPSRVKHALPFNGTVPAFGAPHITGDKPVQRFNATKLTLQHILQGYDNQALVQTVVKDFADILNNPDLPYSELNSVLSALSGRIPQRLEASIHKLADESKAANQEFPAAQFEKLVEDFAREHITLQSEATAYKNSVAPLSSIFARYRNGLTEHAYSNYVELMEAYYDVEILFNQQREEEVILSLRDQHKDDLDKVLAVTLSHAKVNIKNNVILMLLDLINPVSTGSALDKYFTPILKRLSEIESRATQKVTLKARELLILCQLPSYEERQAQMYQILKNSVTESVYGGGSEYRTPSYDAFKDLIDTKFNVFDVLPHFFYHADPYIALAAIEVYCRRSYHAYKILDVAYNLEHKPYVVAWKFLLQTAANGIDSNKRIAAYSDLTFLLNKTEEEPIRTGAMTACNSLADLQAELPRILTAFEEEPLPPMLQRNAAPKEERMENILNIAVRADEDMDDTAFRTKICEMITANADVFRQAHLRRLSVVVCRDNQWPDYYTFRERENYQEDETIRHIEPAMAYQLELARLSNFDIKPCFIENRQMHVYYAVAKENPSDCRFFIRALVRPGRVKSSMRTADYLISESDRLLTDILDTLEIVSHEYKNSDCNHLFINFIPTFAIEADDVEHALKDFVDRHGKRLWKLRVTGAEIRFNVQSKKPDAPIIPMRFTVDNVSGFILKVEVYQEVKTEKSGWILKSVNKIPGAMHMQPLSTPYPTKEWLQPRRYKAHLMGTTYVYDFPELFRQSVQNQWTQAIKRNPLLKQPSHLVEAKELVLDEDDVLQEIDRAPGTNTVGMVAWIMTIRTPEYPSGRRIIAIANDITFKIGSFGVAEDQVFYKASELARALGIPRIYLSANSGARIGLADELISQFRAAWKDASNPTAGFKYLYLTPAEYDVLAQQGDAKSVLVEEIQDEGETRLRITDVIGHTDGLGVENLKGSGLIAGATSRAYDDIFTITLVTCRSVGIGAYLVRLGQRTIQNEGQPIILTGAPALNKVLGREVYTSNLQLGGTQIMYKNGVSHLTAENDLEGIAKIVQWLSFVPDVRNAPVSMRLGADPIDRDIEYTPPKGPSDPRFFLAGKSENGKWLSGFFDQDSFVETLSGWARTVVVGRARLGGIPMGVVSVETRTVENIVPADPANSDSTEQVFMEAGGVWFPNSAYKTAQAINDFNKGEQLPLMIFANWRGFSGGQRDMYNEVLKYGAQIVDALSNYKQPVFVYIIPNGELRGGAWVVVDPTINKDMMEMYADNNARGGVLEPEGIVEIKYRKPALLATMERLDATYASLKKQLAEEGKTDEEKAALKVQVEAREQELLPVYQQISIQFADLHDRAGRMKAKGVIRKALDWRRARHYFYWRVRRRLCEEYTFRKIVTATSAAPMPREQMLDLVKQWFTNDNETVNFEDADELVSEWFEKRASVIDQRISKLKSDATKEQIVSLGNADQEAVIEGFSQLIENLSEDARAEILRKLNSRF

SEQ ID NO: 2 - protein, 2216 aa, Amylomyces rouxii
MVEHRSLPGHFLGGNSLESAPQGPVKDFVQAHEGHTVISKVLIANNGMAAMKEIRSVRKWAYETFGNERAIEFTVMATPEDLKANAEYIRMADNFVEVPGGSNNNNYANVELIVDVAERTAVHAVWAGWGHASENPRLPEMLAKSKHKCLFIGPPASAMRSLGDKISSTIVAQSAQVPTMGWSGDGITETEFDAAGHVIVPDNAYNEACVKTAEQGLKAAEKIGFPVMIKASEGGGGKGIRMVKDGSNFAQLFAQVQGEIPGSPIFIMKLAGNARHLEVQLLADQYGNAISLFGRDCSVQRRHQKIIEEAPVTIAKPDVFEQMEKAAVRLGKLVGYVSAGTVEYLYSHHDDQFYFLELNPRLQVEHPTTEMVSGVNLPAAQLQIAMGIPLHRIRDIRVLYGVQPNSASEIDFGFEHPTSLTSHRRPTPKGHVIACRITAENPDAGFKPSSGIMQELNFRSSTNVWGYFSVVSAGGLHEYADSQFGHIFAYGENRQQARKNMVIALKELSIRADFRSTVEYIIRLLETPDFEENTINTGWLDMLISKKLTAERPDTMLAVFCGAVTKAHMASLDCFQQYKQSLEKGQVPSKGSLKTVFTADFIYEEVRYNFTVTQSAPGIYTLYLNGTKTQVGIRDLSDGGLLISIDGKSHTTYSRDEVQATRMMVDGKTCLLEKESDPTQLRSPSPGKLVNLLVENGDHLNAGDAYAEIEVMKMYMPLIATEDGHVQFIKQAGATLEAGDIIGILSLDDPSRVKHALPFNGTVPAFGAPHITGDKPVQRFNATKLTLQHILQGYDNQALVQTVVKDFADILNNPDLPYSELNSVLSALSGRIPQRLEASIHKLADESKAANQEFPAAQFEKLVEDFAREHITLQSEATAYKNSVAPLSSIFARYRNGLTEHAYSNYVELMEAYYDVEILFNQQREEEVILSLRDQHKDDLDKVLAVTLSHAKVNIKNNVILMLLDLINPVSTGSALDKYFTPILKRLSEIESRATQKVTLKARELLILCQLPSYEERQAQMYQILKNSVTESVYGGGSEYRTPSYDAFKDLIDTKFNVFDVLPHFFYHADPYIALAAIEVYCRRSYHAYKILDVAYNLEHKPYVVAWKFLLQTAANGIDSNKRIASYSDLTFLLNKTEEEPIRTGAMTACNSLADLQAELPRILTAFEEEPLPPMLQRNAAPKEERMENILNIAVRADEDMDDTAFRTKICEMITANADAFRQAHLRRLSVVVCRDNQWPDYYTFRERENYQEDETIRHIEPAMAYQLELARLSNFDIKPCFIENRQMHVYYAVAKENPSDCRFFIRALVRPGRVKSSMRTADYLISESDRLLTDILDTLEIVSHEYKNSDCNHLFINFIPTFAIEADDVEHALKDFVDRHGKRLWKLRVTGAEIRFNVQSKKPDAPIIPMRFTVDNVSGFILKVEVYQEVKTEKSGWILKSVNKIPGAMHMQPLSTPYPTKEWLQPRRYKAHLMGTTYVYDFPELFRQSVQNQWTQAIKRNPLLKQPSHLVEAKELVLDEDDVLQEIDRAPGTNTVGMVAWIMTIRTPEYPSGRRIIAIANDITFKIGSFGVAEDQVFYKASELARALGIPRIYLSANSGARIGLADELISQFRAAWKDASNPTAGFKYLYLTPAEYDVLAQQGDAKSVLVEEIQDEGETRLRITDVIGHTDGLGVENLKGSGLIAGATSRAYDDIFTITLVTCRSVGIGAYLVRLGQRTIQNEGQPIILTGAPALNKVLGREVYTSNLQLGGTQIMYKNGVSHLTAENDLEGIAKIVQWLSFVPDVRNAPVSMRLGADPIDRDIEYTPPKGPSDPRFFLAGKSENGKWLSGFFDQDSFVETLSGWARTVVVGRARLGGIPMGVVSVETRTVENIVPADPANSDSTEQVFMEAGGVWFPNSAYKTAQAINDFNKGEQLPLMIFANWRGFSGGQRDMYNEVLKYGAQIVDALSNYKQPVFVYIIPNGELRGGAWVVVDPTINKDMMEMYADNNARGGVLEPEGIVEIKYRKPALLATMERLDATYASLKKQLAEEGKTDEEKAALKVQVEAREQELLPVYQQISIQFADLHDRAGRMKAKGVIRKALDWRRARHYFYWRVRRRLCEEYTFRKIVTATSAAPMPREQMLDLVKQWFTNDNETVNFEDADELVSEWFEKRASVIDQRISKLKSDATKEQIVSLGNADQEAVVEGFSQLIENLSEDARAEILRKLNSRF

SEQ ID NO: 3 - protein, 2216 aa, Mucor circinelloides f. lusitanicus CBS 277.49
MVEHKSLPGHFLGGNSLESAPQGPVKDFVQAHEGHTVISKVLIANNGMAAMKEIRSVRKWAYETFGNERAIEFTVMATPEDLKANAEYIRMADNFVEVPGGSNNNNYANVELIVDVAERTAVHAVWAGWGHASENPRLPEMLAKSKHKCLFIGPPASAMRSLGDKISSTIVAQSAQVPTMGWSGDGITETEFDAAGHVIVPDNAYNEACVKTAEQGLKAAEKIGFPVMIKASEGGGGKGIRMVKDGSNFAQLFAQVQGEIPGSPIFIMKLAGNARHLEVQLLADQYGNAISLFGRDCSVQRRHQKIIEEAPVTIAKPDVFEQMEKAAVRLGKLVGYVSAGTVEYLYSHHDDQFYFLELNPRLQVEHPTTEMVSGVNLPAAQLQIAMGIPLHRIRDIRVLYGVQPNSASEIDFGFEHPTSLTSHRRPTPKGHVIACRITAENPDAGFKPSSGIMQELNFRSSTNVWGYFSVVSAGGLHEYADSQFGHIFAYGENRQQARKNMVIALKELSIRADFRSTVEYIIRLLETPDFEENTINTGWLDMLISKKLTAERPDTMLAVFCGAVTKAHMASLDCFQQYKQSLEKGQVPSKGSLKTVFTVDFIYEEVRYNFTVTQSAPGIYTLYLNGTKTQVGIRDLSDGGLLISIDGKSHTTYSRDEVQATRMMVDGKTCLLEKESDPTQLRSPSPGKLVNLLVENGDHLNAGDAYAEIEVMKMYMPLIATEDGHVQFIKQAGATLEAGDIIGILSLDDPSRVKHALPFNGTVPAFGAPHITGDKPVQRFNATKLTLQHILQGYDNQALVQTVVKDFADILNNPDLPYSELNSVLSALSGRIPQRLEASIHKLADESKAANQEFPAAQFEKLVEDFAREHITLQSEATAYKNSVAPLSSIFARYRNGLTEHAYSNYVELMEAYYDVEILFNQQREEEVILSLRDQHKDDLDKVLAVTLSHAKVNIKNNVILMLLDLINPVSTGSALDKYFTPILKRLSEIESRATQKVTLKARELLILCQLPSYEERQAQMYQILKNSVTESVYGGGSEYRTPSYDAFKDLIDTKFNVFDVLPHFFYHADPYIALAAIEVYCRRSYHAYKILDVAYNLEHKPYVVAWKFLLQTAANGIDSNKRIASYSDLTFLLNKTEEEPIRTGAMTACNSLADLQAELPRILTAFEEEPLPPMLQRNAAPKEERMENILNIAVRADEDMDDTAFRTKICEMITANADAFRQAHLRRLSVVVCRDNQWPDYYTFRERENYQEDETIRHIEPAMAYQLELARLSNFDIKPCFIENRQMHVYYAVAKENPSDCRFFIRALVRPGRVKSSMRTADYLISESDRLLTDILDTLEIVSHEYKNSDCNHLFINFIPTFAIEADDVEHALKDFVDRHGKRLWKLRVTGAEIRFNVQSKKPDAPIIPMRFTVDNVSGFILKVEVYQEVKTEKSGWILKSVNKIPGAMHMQPLSTPYPTKEWLQPRRYKAHLMGTTYVYDFPELFRQSVQNQWTQAIKRNPLLKQPSHLVEAKELVLDEDDVLQEIDRAPGTNTVGMVAWIMTIRTPEYPSGRRIIAIANDITFKIGSFGVAEDQVFYKASELARALGIPRIYLSANSGARIGLAEELISQFRAAWKDASNPTAGFNYLYLTPAEYDTLVQQGDAKSVLVEEIQDEGETRLRITDVIGHTDGLGVENLKGSGLIAGATSRAYDDIFTITLVTCRSVGIGAYLVRLGQRTVQNEGQPIILTGAPALNKVLGREVYTSNLQLGGTQIMYKNGVSHLTAENDLEGIAKIVQWLSFVPDVRNAPVSMRLGVDPIDRDIEYTPPKGPSDPRFFLAGKSENGKWLSGFFDQDSFIETLSGWARTVVVGRARLGGIPMGVVSVETRTVENIVPADPANSDSTEQVFMEAGGVWFPNSAYKTAQAINDFNKGEQLPLMIFANWRGFSGGQRDMYNEVLKYGAQIVDALSNYKQPVFVYIIPNGELRGGAWVVVDPTINKDMMEMYADNNARGGVLEPEGIVEIKYRKPALLATMERLDATYASLKKQLAEEGKSDEEKAALKVQIEAREQELLPVYQQISIQFADLHDRAGRMKAKGVIRKALDWRRARHYFYWRVRRRLCEEYTFRKIVAATSAAPMSREQMLDLVKQWFTSDNETASFEDADELVSEWFEKRASVIDQRISKLKSDATKEQVVSLGNADQEAVIEGFTQLIENLSEDQRAEILRKLNSRF

SEQ ID NO: 4 - protein, 2216 aa, Mucor ambiguus
MVEHKSLPGHFLGGNSLESAPQGPVKDFVQAHEGHTVISKVLIANNGMAAMKEIRSVRKWAYETFGNERAIEFTVMATPEDLKANAEYIRMADNFVEVPGGSNNNNYANVELIVDVAERTAVHAVWAGWGHASENPRLPEMLAKSKHKCLFIGPPASAMRSLGDKISSTIVAQSAQVPTMGWSGDGITDTEFDAAGHVIVPDNAYNEACVKTAEQGLKAAEKIGFPVMIKASEGGGGKGIRMVKDGSNFAQLFAQVQGEIPGSPIFIMKLAGNARHLEVQLLADQYGNAISLFGRDCSVQRRHQKIIEEAPVTIAKPDIFEQMEKAAVRLGKLVGYVSAGTVEYLYSHHDDQFYFLELNPRLQVEHPTTEMVSGVNLPAAQLQIAMGIPLHRIRDIRVLYGVQPNSASEIDFGFEHPTSLTSHRRPTPKGHVIACRITAENPDAGFKPSSGIMQELNFRSSTNVWGYFSVVSAGGLHEYADSQFGHIFAYGENRQQARKNMVIALKELSIRADFRSTVEYIIRLLETPDFEQNTINTGWLDMLISKKLTAERPDTMLAVFCGAVTKAHMASLDCFQQYKQSLEKGQVPSKGSLKTVFTVDFIYEEVRYNFTVTQSAPGIYTLYLNGTKTQVGIRDLSDGGLLISIDGKSHTTYSRDEVQATRMMVDGKTCLLEKESDPTQLRSPSPGKLVNLLVENGDHLKAGDAYAEIEVMKMYMPLIATEDGHVQFIKQAGATLEAGDIIGILSLDDPSRVKHALPFNGIVPAFGAPHITGDKPVQRFNATKLTLQHILQGYDNQALVQTVVKDFADILNNPDLPYSELNSVLSALSGRIPQRLEASIHKLADESKAANQEFPAAQFEKLVEDFAREHITLQSEATAYKNSVAPLSSIFARYRNGLTEHAYSNYVELMEAYYDVEILFNQQREEEVILSLRDQHKDDLDKVLAVTLSHAKVNIKNNVILMLLDLINPVSTGSALDKYFTPILKRLSEIESRATQKVTLKARELLILCQLPSYEERQAQMYQILKNSVTESVYGGGSEYRTPSYDAFKDLIDTKFNVFDVLPHFFYHADPYIALAAIEVYCRRSYHAYKILDVAYNLEHKPYVVAWKFLLQTAANGIDSNKRIASYSDLTFLLNKTEEEPIRTGAMTACNSLADLQAELPRILTAFEEEPLPPMLQRNAAPKEERMENILNIAVRADEDMDDTAFRTKICEMITANADAFRQAHLRRLSVVVCRDNQWPDYYTFRERENYQEDETIRHIEPAMAYQLELARLSNFDIKPCFIENRQMHVYYAVAKENPSDCRFFIRALVRPGRVKSSMRTADYLISESDRLLTDILDTLEIVSHEYKNSDCNHLFINFIPTFAIEADDVEHALKDFVDRHGKRLWKLRVTGAEIRFNVQSKKPDAPIIPMRFTVDNVSGFILKVEVYQEVKTEKSGWILKSVNKIPGAMHMQPLSTPYPTKEWLQPRRYKAHLMGTTYVYDFPELFRQSVQNQWTQAIKRNPHLKQPSHLVEAKELVLDDDDVLQEIERAPGTNTVGMVAWIMTIRTPEYPSGRRIIAIANDITFKIGSFGVAEDQVFYKASELARALGIPRIYLSANSGARIGLAEELISQFRAAWKDASNPTAGFNYLYLTPAEYDALVQQGDAKSVLVEEIQDEGETRLRITDVIGHTDGLGVENLKGSGLIAGATSRAYDDIFTITLVTCRSVGIGAYLVRLGQRTIQNEGQPIILTGAPALNKVLGREVYTSNLQLGGTQIMYKNGVSHLTAENDLEGIAKIVQWLSFVPDVRNAPVSMRLGADPIDRDIEYTPPKGPSDPRFFLAGKSENGKWLSGFFDQDSFIETLSGWARTVVVGRARLGGIPMGVVSVETRTVENIVPADPANTDSTEQVFMEAGGVWFPNSAYKTAQAINDFNKGEQLPLMIFANWRGFSGGQRDMYNEVLKYGAQIVDALSNYKQPVFVYIIPNGELRGGAWVVVDPTINKDMMEMYADNNARGGVLEPEGIVEIKYRKPALLATMERLDATYASLKKQLAEEGKSDEEKAALKVQIEAREQELLPVYQQISIQFADLHDRAGRMQAKGVIRKALDWRRARHYFYWRVRRRLCEEYTFRKIVTATSAAPMPREQMLGLVKQWFMNDNETANFEDADELVSEWFEKRASVIDQRISKLKSDATKEQIVSLGNVDQEAVFEGFSQLIENLSEDQRAEILRKLNSRF

SEQ ID NO: 5 - protein, 2216 aa, Parasitella parasitica
MVDQKNLPGHFLGGNSLETAPQGPVKDFVQQHEGHTVISKVLIANNGMAAMKEIRSVRKWAYETFGNERAIEFTVMATPEDLKANAEYIRMADNFVEVPGGSNNNNYANVELIVDVAERTAVHAVWAGWGHASENPRLPEMLAKSKYRCLFIGPPASAMRSLGDKISSTIVAQSAQVPTMGWSGDGITETEFDEAGHVVVPEKVYNEACVKTAEEGLKAAEKIGFPVMIKASEGGGGKGIRMVKDGSNFAQLFAQVQGEIPGSPIFIMKLAGNARHLEVQLLADQYGNAISLFGRDCSVQRRHQKIIEEAPVTIAKPDVFEQMEKAAVRLGKLVGYVSAGTVEYLYSHHDDQFYFLELNPRLQVEHPTTEMVSGVNLPAAQLQIAMGIPLHRIRDIRVLYGVQPNSSSEIDFGFEHPTSLTSHRRPTPKGHVIACRITAENPDAGFKPSSGIMQELNFRSSTNVWGYFSVVSAGGLHEYADSQFGHIFAYGENRQQARKNMVIALKELSIRGDFRTTVEYIIRLLETPDFEENTINTGWLDMLISKKLTAERPDTMLAVFCGAVTKAHMASLECFQQYKQSLEKGQVPSKGSLKTVFTVDFIYEEVRYNFTVTQSAPGIYTLYLNGTKTQVGIRDLSDGGLLISIDGKSHTTYSRDEVQATRMMVDGKTCLLEKESDPTQLRSPSPGKLVNLLVENGDHLNAGDAYAEIEVMKMYMPLIAAEDGHVQFIKQAGATLEAGDIIGILSLDDPSRVKHALPFNGTVPAFGAPHITGDKPFQRFNATKLTLEHILQGYDNQALVQTVVKDFADILNNPDLPYSELNSVLSALSGRIPQRLEASIHKLADESKAAQQEFPAAQFEKLVEDFAREHITLQSEVAAYKNSVAPLSSIFERYRNGLTEHAYANYVQLMEAYYDVEILFNQQREEEVILSLRDQHKDDLDKVLAVTLSHAKVNIKNNVILMLLDLINPVSTGNALDKYFTPILKRLSEIDSRATQKVTLKARELLILCQLPSYEERQAQMYQILKNSVTESVYGGGSEYRTPSYDAFKDLIDTKFNVFDVLPHFFYHDDPYIALAAIEVYCRRSYHAYKILDVAYNLEHKPYVVAWKFLLQTAATGIDSNKRIASYSDLTFLLNKTEEEPVRTGAMTACNSLSDLEAELPRILTAFEEEPLPPMLQRNAVPKEARMENILNIAVRADEELDDTAFRTKICEMITAHADAFRHAHLRRLSIVVCRENQWPDYYTFRERENYQEDETIRHIEPAMAYQLELARLSNFDIKPCFIENRQMHVYYATAKENPSDCRFFIRALVRPGRVKSSMRTADYLISESDRLLTDILDTLEIVSHEYKNSDCNHLFINFIPTFAIEADDVEHALKDFVDRHGKRLWKLRVTGAEIRFNVQSKKPDAPIIPMRFTVDNVSGFILKVEVYQEVKTEKNGWILKSVNKIPGAMHMQPLSTPYPTKEWLQPRRYKAHLMGTTYVYDFPELFRQSVQNQWTLAIKRNPLLKQPSRLVEAKELVLDEDDVLQEIDRAPGTNTVGMIAWIMTIRTPEYPSGRRIIAIANDITFKIGSFGVAEDQVFYKASELARSLGIPRIYLSANSGARIGLAEELISKFRAAWEDPCNPTAGFKYLYLTPAEYDALVQQGDAKSVLVEEIQDEGETRLRITDVIGHTDGLGVENLKGSGLIAGATSRAYDDIFTITLVTCRSVGIGAYLVRLGQRTVQNEGQPIILTGAPALNKVLGREVYTSNLQLGGTQIMYKNGVSHLTAENDLEGIAKIVQWLSFVPDVRNAPVCMRMGADPIDRDIEYTPPKGPSDPRFFLAGKSENGKWLSGFFDQDSFIETLSGWARTVVVGRARLGGIPMGVVSVETRTVENIVPADPANSDSTEQVFMEAGGVWFPNSAYKTAQAINDFNKGEQLPLMIFANWRGFSGGQRDMYNEVLKYGAQIVDALSNYKQPVFVYIIPNGELRGGAWVVVDPTINKDMMEMYADNKARGGVLEPEGIVEIKYRKPALLATMERLDATYASLKKQLTEDGKSDQDKAAIKAQVEAREQELLPVYQQISIQFADLHDRSGRMKAKGVIRKALDWRRARHYFYWRVRRRLCEEYSFRKIVSATSSSALTREQMYNLVKQWFTNDNESAEFEDADELVAEWFEKRASVIDQRISKLKSDATKEQVISLGNAEQEAVVEGFSQLLENLSQEARAEILRKLNSRF

SEQ ID NO: 6 - protein, 2216 aa, Rhizopus stolonifer
MVDHKSLPSHFLGGNSVETATQSPVKEFVEAHEGHTVISKVLIANNGMAAMKEIRSVRKWAYETFGNERAIEFTVMATPEDLKANAEYIRMADNYVEVPGGTNNNNYANVELIVDVAERTGVHAVWAGWGHASENPRLPEMLAKSKHKCLFIGPPASAMRSLGDKISSTIVAQHAQVPTMGWSGDNITDVVADASGHVTVPDEAYAKACVKTAEEGLAAAEKIGFPVMIKASEGGGGKGIRMVKDSTNFTQLFAQVQGEIPGSPIFIMKLAGNARHLEVQLLADQYGNAISLFGRDCSVQRRHQKIIEEAPVTIAKPDIFEQMEKAAVRLGKLVGYVSAGTVEYLYSHHDDQFYFLELNPRLQVEHPTTEMVSGVNLPAAQLQIAMGIPLHRIRDIRVLYGVEHNSASEIDFNFEHPTSLTSHRRPTPKGHVIACRITAENPDAGFKPSSGIMQELNFRSSTNVWGYFSVVSAGGLHEYADSQFGHIFAYGENRQAARKNMVIALKELSIRGDFRTTVEYIIRLLETPDFEENTINTGWLDMLISKKLTAKRPDTMLAVFCGAATKAHAAALECFQQYKQSLEKGQVPSKGTLKTVFTVDFIYEEVRYNFTVTLSAPGLYTLYLNGSKTQVGIRDLSDGGLLISIDGKSHTTYSRDEVQATRLMIDGKTCLLEKESDPTQLRSPSPGKLVNLLVENGDHLKAGDAYAEIEVMKMYMPLVATEDGHVQFIKQAGATLEAGDIIGILSLDDPSRVKHALPFSGTVPAFGPPHIIGDKPAQRYNATKHTLEHILQGYDNQALVQTVVKDFADILNDPELPYSELSAVLSVLSGRIPQRLEASIHKLFDESKAAQREFPAVEFLKLIEDFARENVTLQSEATALKNAVAPLVSIFERYRNGLKEHAYSNYVQLMEQYYDVEIMFSQQRDEEVILSLRDQNKDNLDKVLEVVLSHAKVNIKNNLILMLLEIINPVATGNALDKYFTPILKRLSEIESRGTQNVTLKARELLILCQLPSYEERQAQMYQILKSSVTESVYGGGTEYRTPSYDAFKDLIDTKFNVFDVLPHFFYDADPYIALAAIEVYCRRSYHAYKILDVAYNLEHKPYVVAWKFLLQTAATSIDPNKRIASYSDLTFLLNKTEEEPVRTGAMTACNSLEDLEAELPRILTAFEEEPLPPMLQRNAPPKETRMENILNIAIRADDTLDDAAFRTKISDVIASHADAFRQAHLRRISVVVCRDNQWPDYYTFRERENYQEDQTIRHIEPAMAYQLELARLSNFDIKPCFIENRQMHVYYAVAKENPSDCRFFIRALVRPGRVKSSMRTADYLISESDRLLTDILDTLEIVSHEYKNSDCNHLFINFIPTFAIEAEDVEHALKDFVDRHGKRLWKLRVTGAEIRFNVQSKRPDAPIIPMRFTVDNVSGFILKVEVYQEVKTEKNGWVLKSVNKIPGAMHMQPLSTPYPTKEWLQPRRYKAHLMGTTYVYDFPELFRQAVQNQWNQAIKHDSSLKQPSHLVEAKELVLDEDDVLQKIDRAPGTNTVGMVAWLMTIRTPEYPSGRRIIAIANDITFKIGSFGVAEDQVFYKASELARSLGIPRVYLSANSGARIGLAEELIGQFKAAWKNPADPTAGFNYLYLTPADYDALVQQGDAKSVLVEEIQDEGETRLRITDVIGHTDGLGVENLKGSGLIAGATSRAYDDIFTITLVTCRSVGIGAYLVRLGQRTVQNEGQPIILTGAPALNKVLGREVYTSNLQLGGTQIMYKNGVSHLTAENDFEGIGKIIQWLSFVPEVRNGPVTMRMGVDPVDRDIEYMPPKGPSDPRFFLAGKNDENGKWLSGFFDQDSFIETLSGWARTVVVGRARLGGIPMGVVSVETRTVENIVPADPANSDSTEQVFMEAGGVWFPNSAYKTAQAINDFNKGEQLPLMIFANWRGFSGGQRDMYNEVLKYGAKIVDALSNYKQPVFVYIIPNGELRGGAWVVVDPTINKDMMEMYADTHARGGVLEPEGIVEIKYRKPALLATMERLDETYASLKKQLAEEGKTEEEKATLKTQLEAREQELLPVYQQISIQFADLHDRSGRMKAKGVIRKALDWRRARQYFYWRVRRRLCEEYTFRKITTATNSTMSREQMVTLVKQWFTNDNESVDFDDADEIVAEWFDKRASVIEQRITKIKSDSLKQQVTSLGAVDQEAVIEGFSELLENLSQDARAEILRKLNSRF

SEQ ID NO: 7 - protein, 2213 aa, Choanephora cucurbitarum
MVDHKSLPSHFLGGNSIENAPQSPVKDFVQAHEGHTVISKVLIANNGMAAMKEIRSVRKWAYETFGNERAIEFTVMATPEDLKANAEYIRMADNYVEVPGGTNNNNYANVELIVDVAERTGAHAVWAGWGHASENPRLPEMLAESKYKCLFIGPPASAMRSLGDKISSTIVAQHADVPTMGWSGDGVKDVETDTSGHVVVPDDAYARACVKTAEEGLAAAEKIGFPVMIKASEGGGGKGIRKVEDSSNFAQLFSQVQGEIPGSPIFIMKLAGNARHLEVQLLADQYGNAISLFGRDCSVQRRHQKIIEEAPVTIAKPDIFEQMEKAAVRLGKLVGYVSAGTVEYLYSHHDDQFYFLELNPRLQVEHPTTEMVSGVNLPAAQLQIAMGIPLHRIRDIRVLYGVEHNSASEIDFNFDNPSSLTSHRRPTPKGHVIACRITAENPDAGFKPSSGIMHELNFRSSTDVWGYFSVVSAGGLHEFADSQFGHIFAYGENRQAARKNMVIALKELSIRGDFRTTVEYIIRLLETPDFEENTINTGWLDMLISKKMTAERPDTMLAIFCGAATKAHAAALESFQQYKQSLEKGQVPSKGSLKTVFTVDFIYEEVRYNFTVTLSAPGLYTLYLNGTKTQVFIRDLSDGGLLISMDGKSHTTYSRDEVQATRLMIDGKTCLLEKESDPTQLRSPSPGKLVNLLVENGDHLKAGDAYAEIEVMKMYMPLVATEDGHVQFIKQAGATLEAGDIIGILSLDDPSRVKHALPFNGTVPTFGPPHIVGDKPVQRFNATKQTLEHILKGYDNQALVQTAVKEFADILNNPKLPYSELSSVLSVLSGRIPQRLESAIHKLFDESKSTQREFPAVEFLQLIENFARDNLQLQSEVTAYKNSVAPLVDIFERYKNGLKEHAYSNYVQLMEQYYDVEILFSQQREEEVILSLRDQYKDNLDKVLEVVLSHAKVNVKNNLILILLEIINPVATGSALDKYFTPILKRLSEIESRATQKVTLKARELLILCQLPSYEERQAQMYQILKNSVTESVYGGGTEYRTPSYDTFKDLIDTKFNVFDVLPHFFYHDDPYIALAAIEVYCRRSYHAYKILDVAYNLEHKPYVVAWKFLLQTAATSIDPNKRIASYSDLTFLLNKTEEEPVRTGAMTACNSLEDLEAQLPRILTAFEEEPLPPMLQRAEKEARMENILNIAIRADDSLDDAAFRTKISEVIASHADAFRQAHLRRISVVVCRGSQWPDYYTFREREDYKEDETIRHIEPAMAYQLELARLSNFDIKPCFIENRQMHVYYAVAKENPSDCRFFIRALVRPGRVKSSMRTADYLISESDRLLTDILDTLEIVSHEYKNSDCNHLFINFIPTFAIEAEDVEHALKDFVDRHGKRLWKLRVTGAEIRFNVQSKRPDAPIIPMRFIVDNVSGFILKVEVYQEVKTEKNGWVLKSVNKIPGAMHMQSLSTPYPTKEWLQPRRYKAHLMGTTYVYDFPELFRQAVQNQWTQAIKHDASLKQPSHLVEAKELVLDEDDVLQEIDRAPGTNTVGMVAWIITMRTPEFPSGRRIIAIANDITFKIGSFGVAEDQVFYKASELARSLGIPRVYLSANSGARIGLAEELISQFRAAWKVPSDPTAGFNYLYLTPADYETLVQQGDAKSVLVEEIQDEGETRLRITDVIGHTDGLGVENLRGSGLIAGATSRAYDDIFTITLVTCRSVGIGAYLVRLGQRTVQNEGQPIILTGAPALNKVLGREVYTSNLQLGGTQIMYKNGVSHLTAENDFEGISKIVRWLSFVPEVRNGPVTMRLGADPIDRDIEYMPPKGPSDPRFFLAGKNENGKWLSGFFDQDSFVETLSGWARTVVVGRARLGGIPMGVVSVETRTVENIVPADPANSDSTEQVFMEAGGVWFPNSAYKTAQAINDFNKGEQLPLMIFANWRGFSGGQRDMYNEVLKYGAQIVDALSNYKQPVFVYIVPNGELRGGAWVVVDPTINKDMMEMYADKHARGGVLEPEGIVEIKYRKPALLATMERLDATYASLKKQLAEEGKTEEEKTALKAQIEAREQELLPVYQQISIQFADLHDRSGRMKAKGVIRKALDWRRARHYFYWRVRRRLCEEYAFRKIVAATDSTMSREDMASLVKQWFANDHESTDYDEADEIVSEWFEKRASVIDQRISKLKTDSLKQQVATLGSVDQEAVIEGFSQLLENLSADARADILRKLNSRF

SEQ ID NO: 8 - protein, 2215 aa, Rhizopus delemar RA 99-880
MVDSKNLPSHFLGGNSLETAPQGPVKDFVEAHEGHTVISKVLIANNGMAAMKEIRSVRKWAYETFGNERAIEFTVMATPEDLKANAEYIRMADNYVEVPGGTNNNNYANVELIVDVAERTGVHAVWAGWGHASENPRLPEMLAKSKHKCVFIGPPASAMRSLGDKISSTIVAQSAQVPTMGWSGDGITETEMDSAGHVIVPENAYEAACVKTAEEGLKAAEKIGFPVMIKASEGGGGKGIRKVENGSNFAQLFSQVQGEIPGSPIFIMKLAGNARHLEVQLLADQYGNAISLFGRDCSVQRRHQKIIEEAPVTIAKPDVFEQMEKAAVRLGKLVGYVSAGTVEYLYSHHDDQFYFLELNPRLQVEHPTTEMVSGVNLPAAQLQIAMGIPLHRIRDIRVLYGVQHNGASEIDFSFEHPTSLTSHRRPVPKGHVIAVRITAENPDAGFKPSSGMMQELNFRSSTNVWGYFSVVSAGGLHEYADSQFGHIFAYGENRQQARKNMVIALKELSIRGDFRTTVEYIIRLLETPDFEENTINTGWLDMLISKKLTAERPDTMLAVYCGAVTKAHMASQACFQQYQQSLEKGQVPSKATLKTVFSVEFIYEDVRFNFTVTRSAPSIYTLYLNGAKTEVGVRDLSDGGLLISIDGKSHTTYSRDEVQATRLMIDGKTCLLEKESDPTQLRSPSPGKLVNLLLENGDHVKAGEAYAEIEVMKMYMPLVASEDGHVQFIKQAGATLEAGDIIGILSLDDPSRVKHALPFSGSVPTYGAPYLTGDKPIQRLHTTMGILQNVLQGYDNQAPVQTVVKDLTDVLNNPELPYSEMNSVFSALSGRIPLRLEANLHKLFDEASAAKRPFPAQEFEKLVEDFARENIKLQSEATAYKNAVAPLTSIFERFRNGLKEHEYAVYVQLMEQYYDVEILFSGQQREEEVVLSLRDQYKDDLEKVLAIVLSHAKVNTKNNLVLLLLDLISPVANGIALDKFFMPILKRLSEIDNRATQKVTLKARELLILCQLPSVEERQAQMYQILKSSVTESVYGGGTEYRTPSYDAIKDLIDTKFNVFDVLPAFFYHADPYIALAALEVYCRRSYHAYKILDVAYNLERKPYVVAWKFLLQTAVNNIDPGKRIASFSDLTFLLNKTEEEPVRTGAMTACNSLEDLESELPRILTAFEEEPLPPMLQQKRDATQSRMENILNIALRAGDDFDEAAMRAKISERIAAHADDFRKAHLRRISIVVCRDNQLPDYYTFRERENYQEDQTIRHIEPAMAYQLELARLSNFDIKPCFIENRQMHVYYAVAKENPSDCRFFIRALVRPGRVKSSMRTADYLISESDRLLNDILDTLEIVSHEYKNSDCNHLFINFIPTFAIEADEVEHALKDFVDRHGKRLWKLRVTGAEIRFNVQSKRPDAPIIPMRFTVDNVSGFILKVDVYQEVKTEKNGWVLKSLNKVPGSMHMQPLSNPYPTKEWLQPRRYKAHLMGTTYVYDFPELFRQSVQNQWNQACKRDSSLKQPSQIVEAKELVLDEDNVLQEVERAPGTNTVGMVAWIMTLRTPEHPSGRRIIAIANDITFKIGSFGVSEDMVFFKASELARHLGIPRIYLSANSGARIGLADELISQFRAAWKDASDPTAGFKYLYLTPAEYDNLARQGDIKSVLVEEIEDEGETRLRITDIIGHTDGLGVENLRGSGLIAGETSRAYDDIFTITLVTCRSVGIGAYLVRLGQRTVQNEGQPIILTGAPALNKVLGREVYTSNLQLGGTQIMYKNGVSHLTAENDLEGIHKIVQWLSFVPAVRNAPVTMRIGTDPIDRDIEFTPPKGPSDPRFFLAGKNENGKWLSGFFDQDSFVETLSGWARTVVVGRARLGGIPMGVVSVETRTVENIVPADPANAESTEQVFMEAGGVWYPNSAYKTAQAINDFNKGEQLPLMIFANWRGFSGGQRDMYNEVLKYGAQIVDALRNYKQPVFVYIVPNGELRGGAWVVVDPTINQDMMEMYADTQARGGVLEPEGIVEIKYRKPQLLATMARLDEKYGSLKKQLENAELSADQKAEVQKQLEVREQELLPIYQQMAIQFADLHDRTGRMEAKGVIRKPLEWRRARHYFYWRVRRRLCEEYTFRKIVSANASVSREKMLSLVKQWFESDNETVSYEDADQDVAEWFEKRASVIDQHISKLKSESVKEQIISLGAADQEAALDGFASILQSLNEEARAEILRKINLRI

SEQ ID NO: 9 - protein, 2216 aa, Rhizopus microsporus ATCC 52813
MVDTKNLPSHFLGGNSLDTAPQGPVRDFVEAHEGHTVISKVLIANNGMAAMKEIRSVRKWAYETFGNERAIEFTVMATPEDLKANAEYIRMADNYVEVPGGTNNNNYANVELIVDVAERTGVHAVWAGWGHASENPRLPEMLAKSKHKCVFIGPPASAMRSLGDKISSTIVAQSAQVPTMGWSGDGITETEVDEAGHVVVPERAYESACVKTAEEGLKAAEKIGFPVMIKASEGGGGKGIRKVEDASNFAHLFTQVQNEIPGSPIFIMKLAGNARHLEVQLLADQYGNAISLFGRDCSVQRRHQKIIEEAPVTIAKPDIFEQMEKAAVRLGKLVGYVSAGTVEYLYSHHDDQFYFLELNPRLQVEHPTTEMVSGVNLPAAQLQIAMGIPLHRIRDIRVLYGLQPNSASEIDFDFEDPSSLTSLRRPVPKGHVIAVRITAENPDAGFKPSSGMMQELNFRSSTNVWGYFSVVSAGGLHEYADSQFGHIFSYGENRQQARKNMVIALKELSIRGDFRTTVEYIIRLLETPDFEENTINTGWLDMLISKKMTAERPDTMLAVYCGAVTKAHMAAQACLQQYKQSLEKGQVPSKSTLKTVFSVEFIYEEVRFNFTVTRSAPGVYTLYLNGTKTEVGVRDLSDGGLLISIDGKSHTTYSRDEVQATRLMVDGKTCLLEKESDPTQLRSPSPGKLVNLLLENGDHVKAGQAYAEIEVMKMYMPLVAAEDGHVQFIKQAGATLEAGDIIGILSLDDPSRVKHALPFNGTVPAFGPPYLIGDKPIQRFRATMDILQNILQGYDNQALVQTVVKDLTDILNNPELPYSEMNSVFSALSGRIPLRLETALHKLFDEARAEKRPFPAQEFEKMVEDYARENIKLQSEATAYKNSLAPLTSIFERFRNGLKEHEYAVYVQLMEQYYDVEILFSGQQREEEVILALRDQNKDDLDKVLAIILSHAKVNTKNNLVLLLLDLISPVANGAAFDKFFMPILKRLSEIDSRATQKVTLKARELLILCQLPSHEERKAQMYQILKSSVTEPVYGGGIEYRTPSYDAFKDLVDTKFNVFDVLPPFFYHEDPYIALAALEVYCRRSYHAYKILDVAYNLDRKPYIVAWKFLLQTAANNVDPSKRIASYSDLTFLLNKTEEEPIRTGAMTACNSLEDLQSELPRILTAFEEEPLPPMLQQKREASESRMENILNIALRAGTDFDDSVMRSKISELIAAHAEQFRKAHLRRISVVVCRENQYPDYYTFRERENYQEDETIRHIEPAMAYQLELARLSNFDIKPCFIENRQMHVYYAVAKENPSDCRFFIRALVRPGRVKSSMRTADYLISESDRLLTDILDTLEIVSHEYKNSDCNHLFINFIPTFAIEVDEVEHALKDFVDRHGKRLWKLRVTGAEIRFNVQSKRPDAPIIPMRFIVDNVSGFILKVDVYQEIKTEKSGWVLKSLNKIPGSMHMQPLSTPYPTKEWLQPRRYKAHLMGTTYVYDFPELFRQSVQNQWTQACKRDPSLKQPSQLVEAKELVLDEDNVLQEIDRAPGTNTVGMVAWIMTLRTPEYPSGRRIIAIANDITFKIGSFGVAEDMVFYKASELARNLGIPRVYLSANSGARIGLADELIGQFRAAWKEPSDPTSGFKYLYLTPADYETLSRQGDTKSVLVEEIEDDGEKRLRITDVIGHTDGLGVENLRGSGLIAGETSRAYDDIFTITLVTCRSVGIGAYLVRLGQRTVQNEGQPIILTGAPALNKVLGREVYTSNLQLGGTQIMYKNGVSHLTAENDLEGIGKIVQWLSFVPAVRNAPVTMRISTDPVDRDIEYTPPKGPSDPRFFLAGKNENGKWLSGFFDQDSFVETLSGWARTVVVGRARLGGIPMGVVSVETRTVENIVPADPANAESTEQVFMEAGGVWYPNSAYKTAQAINDFNKGEQLPLMIFANWRGFSGGQRDMYNEVLKYGAQIVDALRSYKQPVFVYIVPNGELRGGAWVVVDPTINKDMMEMYADTQARGGVLEPEGIVEIKYRKPQLLATMARLDEKYGALKKQLETPDITADQKAEVQKQLDAREQELLPIYQQIAIQFADLHDRTGRMQAKGVIRKPIEWRRARHYFYWRVRRRLCEEYTFRKIVTASNGGMSREKMFNLVKQWFENDHASVSFDDADEIVAEWFDKRASVIEQRISKLKSEAVKEQIISLAAADQEAVLDGFASILQNMSEETKADILKKINSMI

SEQ ID NO: 10 - protein, 2216 aa, Rhizopus microsporus
MVDTKNLPSHFLGGNSLDTAPQGPVRDFVEAHEGHTVISKVLIANNGMAAMKEIRSVRKWAYETFGNERAIEFTVMATPEDLKANAEYIRMADNYVEVPGGTNNNNYANVELIVDVAERTGVHAVWAGWGHASENPRLPEMLAKSKHKCVFIGPPASAMRSLGDKISSTIVAQSAQVPTMGWSGDGITETEIDEAGHVVVPERAYESACVKTAEEGLKAAEKIGFPVMIKASEGGGGKGIRKVEDASNFAHLFTQVQNEIPGSPIFIMKLAGNARHLEVQLLADQYGNAISLFGRDCSVQRRHQKIIEEAPVTIAKPDIFEQMEKAAVRLGKLVGYVSAGTVEYLYSHHDDQFYFLELNPRLQVEHPTTEMVSGVNLPAAQLQIAMGIPLHRIRDIRVLYGLQPNSTSEIDFEFEDPSSLTSLRRPVPKGHVIAVRITAENPDAGFKPSSGMMQELNFRSSTNVWGYFSVVSAGGLHEYADSQFGHIFSYGENRQQARKNMVIALKELSIRGDFRTTVEYIIRLLETPDFEENTINTGWLDMLISKKMTAERPDTMLAVYCGAVTKAHMAAQACLQQYKQSLEKGQVPSKSTLKTVFSVEFIYEEVRFNFTVTRSAPGVYTLYLNGTKTEVGVRDLSDGGLLISLDGKSHTTYSRDEVQATRLMIDGKTCLLEKESDPTQLRSPSPGKLVNLLLENGDHVKAGQAYAEIEVMKMYMPLVAAEDGHVQFIKQAGATLEAGDIIGILSLDDPGRVKHALPFSGTVPAFGPPYLIGDKPIQRFRATMDILQNILQGYDNQALVQTVVKDLTDILNNPELPYSEMNSVFSALSGRIPLRLETALHKLFNEARAEKRPFPAQEFEKMVEDYARENIKLQSEATAYKNSLAPLTSIFERFRNGLKEHEYAVYVQLMEQYYDVEILFSGQQREEEVILSLRDQNKDDLDKVLAIILSHAKVNTKNNLVLLLLDLISPVANGAAFDKFFMPILKRLSEIDSRATQKVTLKARELLILCQLPSHEERKAQMYQILKSSVTEPVYGGGIEYRTPSYDAFKDLVDTKFNVFDVLPPFFYHEDPYIALAALEVYCRRSYHAYKILDVAYNLDRKPYIVAWKFLLQTAANNVDPSKRIASYSDLTFLLNKTEEEPIRTGAMTACNSLEDLQSELPRILTAFEEEPLPPMLQQKREASESRMENILNIALRAGADFDDTVMRSKISELIAAHAEQFRKAHLRRISVVVCRENQYPDYYTFRERENYQEDETIRHIEPAMAYQLELARLSNFDIKPCFIENRQMHVYYAVAKENPSDCRFFIRALVRPGRVKSSMRTADYLISESDRLLTDILDTLEIVSHEYKNSDCNHLFINFIPTFAIEVDEVEHALKDFVDRHGKRLWKLRVTGAEIRFNVQSKRPDAPIIPMRFIVDNVSGFILKVDVYQEIKTEKSGWVLKSLNKIPGSMHMQPLSTPYPTKEWLQPRRYKAHLMGTTYVYDFPELFRQSVQNQWTQACKRDPSLKQPSQLVEAKELVLDEDKVLQEVDRAPGTNTVGMVAWIMTLRTPEYPSGRRIIAIANDITFKIGSFGVAEDMVFYKASELARNLGIPRVYLSANSGARIGLADELIGQFRAAWKDPSDPTSGFKYLYLTPADYETLSRQGDTKSVLVEEIEDDGEKRLRITDVIGHTDGLGVENLRGSGLIAGETSRAYDDIFTITLVTCRSVGIGAYLVRLGQRTVQNEGQPIILTGAPALNKVLGREVYTSNLQLGGTQIMYKNGVSHLTAENDLEGIGKIVQWLSFVPAVRNAPVTMRIGTDPVDRDIEYTPPKGPSDPRFFLAGKNENGKWLSGFFDQDSFVETLSGWARTVVVGRARLGGIPMGVVSVETRTVENIVPADPANTESTEQVFMEAGGVWYPNSAYKTAQAINDFNKGEQLPLMIFANWRGFSGGQRDMYNEVLKYGAQIVDALRNYKQPVFVYIVPNGELRGGAWVVVDPTINKDMMEMYADTQARGGVLEPEGIVEIKYRKPQLLATMARLDEKYGALKKQLETPDITADQKAEVQKQLDAREQELLPIYQQIAIQFADLHDRTGRMQAKGVIRKPIEWRRARHYFYWRVRRRLCEEYTFRKIVTASNGGMSREKMFNLVKQWFENDHASVSFDDADEIVAEWFDKRASVIEQRINKLKSEAVKEQIISLAAADQEAVLDGFASILQNMSEETKADILKKINSMI

SEQ ID NO: 11 - protein, 2216 aa, Rhizopus microspores
MVDTKNLPSHFLGGNSLDTAPQGPVRDFVEAHEGHTVISKVLIANNGMAAMKEIRSVRKWAYETFGNERAIEFTVMATPEDLKANAEYIRMADNYVEVPGGTNNNNYANVELIVDVAERTGVHAVWAGWGHASENPRLPEMLAKSKHKCVFIGPPASAMRSLGDKISSTIVAQSAQVPTMGWSGDGITETEVDEAGHVIVPERAYESACVKTAEEGLKAAEKIGFPVMIKASEGGGGKGIRKVEDASNFAHLFTQVQNEIPGSPIFIMKLAGNARHLEVQLLADQYGNAISLFGRDCSVQRRHQKIIEEAPVTIAKPDIFEQMEKAAVRLGKLVGYVSAGTVEYLYSHHDDQFYFLELNPRLQVEHPTTEMVSGVNLPAAQLQIAMGIPLHRIRDIRVLYGLQPNSTSEIDFDFEDPSSLTSLRRPVPKGHVIAVRITAENPDAGFKPSSGMMQELNFRSSTNVWGYFSVVSAGGLHEYADSQFGHIFSYGENRQQARKNMVIALKELSIRGDFRTTVEYIIRLLETPDFEENTINTGWLDMLISKKMTAERPDTMLAVYCGAVTKAHMAAQACLQQYKQSLEKGQVPSKSTLKTVFSVEFIYEEVRFNFTVTRSAPGVYTLYLNGTKTEVGVRDLSDGGLLISLDGKSHTTYSRDEVQATRLMVDGKTCLLEKESDPTQLRSPSPGKLVNLLLENGDHVKAGQAYAEIEVMKMYMPLVAAEDGHVQFIKQAGATLEAGDIIGILSLDDPSRVKHALPFNGTVPAFGPPYLIGDKPIQRFRATMDILQNILQGYDNQALVQTVVKDLTDILNNPELPYSEMNSVFSALSGRIPLRLETALHKLFNEARAEKRPFPAQEFEKMVEDYARENIKLQSEATAYKNSLAPLTSIFERFRNGLKEHEYAVYVQLMEQYYDVEILFSGQQREEEVILTLRDQNKDDLDKVLAIILSHAKVNTKNNLVLLLLDLISPVANGAAFDKFFMPILKRLSEIDSRATQKVTLKARELLILCQLPSHEERKAQMYQILKSSVTEPVYGGGIEYRTPSYDAFKDLVDTKFNVFDVLPPFFYHEDPYIALAALEVYCRRSYHAYKILDVAYNLDRKPYIVAWKFLLQTAANNVDPSKRIASYSDLTFLLNKTEEEPIRTGAMTACNSLEDLQSELPRILTAFEEEPLPPMLQQKREASESRMENILNIALRAGTDFDDSVMRSKISELIAAHAEQFRKAHLRRISVVVCRENQYPDYYTFRERENYQEDETIRHIEPAMAYQLELARLSNFDIKPCFIENRQMHVYYAVAKENPSDCRFFIRALVRPGRVKSSMRTADYLISESDRLLTDILDTLEIVSHEYKNSDCNHLFINFIPTFAIEVDEVEHALKDFVDRHGKRLWKLRVTGAEIRFNVQSKRPDAPIIPMRFIVDNVSGFILKVDVYQEIKTEKSGWVLKSLNKIPGSMHMQPLSTPYPTKEWLQPRRYKAHLMGTTYVYDFPELFRQSVQNQWTQACKRDPSLKQPSQLVEAKELVLDEDNVLQEIDRAPGTNTVGMVAWIMTLRTPEYPSGRRIIAIANDITFKIGSFGVAEDMVFYKASELARNLGIPRVYLSANSGARIGLADELIGQFRAAWKEPSDPTSGFKYLYLTPADYEALSRQGDTKSVLVEEIEDDGEKRLRITDVIGHTDGLGVENLRGSGLIAGETSRAYDDIFTITLVTCRSVGIGAYLVRLGQRTVQNEGQPIILTGAPALNKVLGREVYTSNLQLGGTQIMYKNGVSHLTAENDLEGIGKIVQWLSFVPAVRNAPVTMRISTDPVDRDIEYTPPKGPSDPRFFLAGKNENGKWLSGFFDQDSFVETLSGWARTVVVGRARLGGIPMGVVSVETRTVENIVPADPANAESTEQVFMEAGGVWYPNSAYKTAQAINDFNKGEQLPLMIFANWRGFSGGQRDMYNEVLKYGAQIVDALRSYKQPVFVYIVPNGELRGGAWVVVDPTINKDMMEMYADTQARGGVLEPEGIVEIKYRKPQLLATMARLDEKYGALKKQLETPDITADQKAEVQKQLDAREQELLPIYQQIAIQFADLHDRTGRMQAKGVIRKPIEWRRARHYFYWRVRRRLCEEYTFRKIVTASNGDMSREKMFNLVKQWFENDHASVSFDDADEMVAEWFDKRASVIEQRISKLKSEAVKEQIISLAAADQEAVLDGFASILQNMSEETKADILKKINSMI

SEQ ID NO: 12 - protein, 2216 aa, Rhizopus azygosporus
MVDTKNLPSHFLGGNSLDTAPQGPVRDFVEAHEGHTVISKVLIANNGMAAMKEIRSVRKWAYETFGNERAIEFTVMATPEDLKANAEYIRMADNYVEVPGGTNNNNYANVELIVDVAERTGVHAVWAGWGHASENPRLPEMLAKSKHKCVFIGPPASAMRSLGDKISSTIVAQSAQVPTMGWSGDGITETEVDEAGHVIVPERAYESACVKTAEEGLKAAEKIGFPVMIKASEGGGGKGIRKVEDASNFAHLFTQVRNEIPGSPIFIMKLAGNARHLEVQLLADQYGNAISLFGRDCSVQRRHQKIIEEAPVTIAKPDIFEQMEKAAVRLGKLVGYVSAGTVEYLYSHHDDQFYFLELNPRLQVEHPTTEMVSGVNLPAAQLQIAMGIPLHRIRDIRVLYGLQPNSTSEIDFDFEDPSSLTSLRRPVPKGHVIAVRITAENPDAGFKPSSGMMQELNFRSSTNVWGYFSVVSAGGLHEYADSQFGHIFSYGENRQQARKNMVIALKELSIRGDFRTTVEYIIRLLETPDFEENTINTGWLDMLISKKMTAERPDTMLAVYCGAVTKAHMAAQACLQQYKQSLEKGQVPSKSTLKTVFSVEFIYEEVRFNFTVTRSAPGVYTLYLNGTKTEVGVRDLSDGGLLISLDGKSHTTYSRDEVQATRLMVDGKTCLLEKESDPTQLRSPSPGKLVNLLLENGDHVKAGQAYAEIEVMKMYMPLVAAEDGHVQFIKQAGATLEAGDIIGILSLDDPSRVKHALPFNGTVPAFGPPYLIGDKPIQRFRATMDILQNILQGYDNQALVQTVVKDLTDILNNPELPYSEMNSVFSALSGRIPLRLETALHKLFNEARAEKRPFPAQEFEKMVEDYARENIKLQSEATAYKNSLAPLTSIFERFRNGLKEHEYAVYVQLMEQYYDVEILFSGQQREEEVILTLRDQNKDDLDKVLAIILSHAKVNTKNNLVLLLLDLISPVANGAAFDKFFMPILKRLSEIDSRATQKVTLKARELLILCQLPSHEERKAQMYQILKSSVTEPVYGGGIEYRTPSYDAFKDLVDTKFNVFDVLPPFFYHEDPYIALAALEVYCRRSYHAYKILDVAYNLDRKPYIVAWKFLLQTAANNVDPSKRIASYSDLTFLLNKTEEEPIRTGAMTACNSLEDLQSELPRILTAFEEEPLPPMLQQKREASESRMENILNIALRAGADFDDSVMRSKISELIAAHAEQFRKAHLRRISVVVCRENQYPDYYTFRERENYQEDETIRHIEPAMAYQLELARLSNFDIKPCFIENRQMHVYYAVAKENPSDCRFFIRALVRPGRVKSSMRTADYLISESDRLLTDILDTLEIVSHEYKNSDCNHLFINFIPTFAIEVDEVEHALKDFVDRHGKRLWKLRVTGAEIRFNVQSKRPDAPIIPMRFIVDNVSGFILKVDVYQEIKTEKSGWVLKSLNKIPGSMHMQPLSTPYPTKEWLQPRRYKAHLMGTTYVYDFPELFRQSVQNQWTQACKRDPSLKQPSQLVEAKELVLDEDNVLQEIDRAPGTNTVGMVAWIMTLRTPEYPSGRRIIAIANDITFKIGSFGVAEDMVFYKASELARNLGIPRVYLSANSGARIGLADELIGQFRAAWKEPSDPTSGFKYLYLTPADYEALSRQGDTKSVLVEEIEDDGEKRLRITDVIGHTDGLGVENLRGSGLIAGETSRAYDDIFTITLVTCRSVGIGAYLVRLGQRTVQNEGQPIILTGAPALNKVLGREVYTSNLQLGGTQIMYKNGVSHLTAENDLEGIGKIVQWLSFVPAVRNAPVTMRISTDPVDRDIEYTPPKGPSDPRFFLAGKNENGKWLSGFFDQDSFVETLSGWARTVVVGRARLGGIPMGVVSVETRTVENIVPADPANAESTEQVFMEAGGVWYPNSAYKTAQAINDFNKGEQLPLMIFANWRGFSGGQRDMYNEVLKYGAQIVDALRSYKQPVFVYIVPNGELRGGAWVVVDPTINKDMMEMYADTQARGGVLEPEGIVEIKYRKPQLLATMARLDEKYGALKKQLETPDITADQKAEVQKQLDAREQELLPIYQQIAIQFADLHDRTGRMQAKGVIRKPIEWRRARHYFYWRVRRRLCEEYTFRKIVTASNGGMSREKMFNLVKQWFENDHASVSFDDADEMVAEWFDKRASVIEQRISKLKSEAVKEQIISLAAADQEAVLDGFASILQNMSEETKADILKKINSMI

SEQ ID NO: 13 - protein, 2216 aa, Rhizopus microspores
MVDTKNLPSHFLGGNSLDTAPQGPVRDFVEAHEGHTVISKVLIANNGMAAMKEIRSVRKWAYETFGNERAIEFTVMATPEDLKANAEYIRMADNYVEVPGGTNNNNYANVELIVDVAERTGVHAVWAGWGHASENPRLPEMLAKSKHKCVFIGPPASAMRSLGDKISSTIVAQSAQVPTMGWSGDGITETEIDEAGHVVVPERAYESACVKTAEEGLKAAEKIGFPVMIKASEGGGGKGIRKVEDASNFAHLFTQVQNEIPGSPIFIMKLAGNARHLEVQLLADQYGNAISLFGRDCSVQRRHQKIIEEAPVTIAKPDIFEQMEKAAVRLGKLVGYVSAGTVEYLYSHHDDQFYFLELNPRLQVEHPTTEMVSGVNLPAAQLQIAMGIPLHRIRDIRVLYGLQPNSTSEIDFEFEDPSSLTSLRRPVPKGHVIAVRITAENPDAGFKPSSGMMQELNFRSSTNVWGYFSVVSAGGLHEYADSQFGHIFSYGENRQQARKNMVIALKELSIRGDFRTTVEYIIRLLETPDFEENTINTGWLDMLISKKMTAERPDTMLAVYCGAVTKAHMAAQACLQQYKQSLEKGQVPSKSTLKTVFSVEFIYEEVRFNFTVTRSAPGVYTLYLNGTKTEVGVRDLSDGGLLISLDGKSHTTYSRDEVQATRLMIDGKTCLLEKESDPTQLRSPSPGKLVNLLLENGDHVKAGQAYAEIEVMKMYMPLVAAEDGHVQFIKQAGATLEAGDIIGILSLDDPGRVKHALPFSGTVPAFGPPYLIGDKPIQRFRATMDILQNILQGYDNQALVQTVVKDLTDILNNPELPYSEMNSVFSALSGRIPLRLETALHKLFNEARAEKRPFPAQEFEKMVEDYARENIKLQSEATAYKNSLAPLTSIFERFRNGLKEHEYAVYVQLMEQYYDVEILFSGQQREEEVILSLRDQNKDDLDKVLAIILSHAKVNTKNNLVLLLLDLISPVANGAAFDKFFMPILKRLSEIDSRATQKVTLKARELLILCQLPSHEERKAQMYQILKSSVTEPVYGGGIEYRTPSYDAFKDLVDTKFNVFDVLPPFFYHEDPYIALAALEVYCRRSYHAYKILDVAYNLDRKPYIVAWKFLLQTAANNVDPSKRIASYSDLTFLLNKTEEEPIRTGAMTACNSLEDLQSELPRILTAFEEEPLPPMLQQKREASESRMENILNIALRAGADFDDSVMRSKISELIAAHAEQFRKAHLRRISVVVCRENQYPDYYTFRERENYQEDETIRHIEPAMAYQLELARLSNFDIKPCFIENRQMHVYYAVAKENPSDCRFFIRALVRPGRVKSSMRTADYLISESDRLLTDILDTLEIVSHEYKNSDCNHLFINFIPTFAIEVDEVEHALKDFVDRHGKRLWKLRVTGAEIRFNVQSKRPDAPIIPMRFIVDNVSGFILKVDVYQEIKTEKSGWVLKSLNKIPGSMHMQPLSTPYPTKEWLQPRRYKAHLMGTTYVYDFPELFRQSVQNQWTQACKRDPSLKQPSQLVEAKELVLDEDKVLQEVDRAPGTNTVGMVAWIMTLRTPEYPSGRRIIAIANDITFKIGSFGVAEDMVFYKASELARNLGIPRVYLSANSGARIGLADELIGQFRAAWKDPSDPASGFKYLYLTPADYETLSRQGDTKSVLVEEIEDDGEKRLRITDVIGHTDGLGVENLRGSGLIAGETSRAYDDIFTITLVTCRSVGIGAYLVRLGQRTVQNEGQPIILTGAPALNKVLGREVYTSNLQLGGTQIMYKNGVSHLTAENDLEGIGKIVQWLSFVPAVRNAPVTMRIGTDPVDRDIEYTPPKGPSDPRFFLAGKNENGKWLSGFFDQDSFVETLSGWARTVVVGRARLGGIPMGVVSVETRTVENIVPADPANAESTEQVFMEAGGVWYPNSAYKTAQAINDFNKGEQLPLMIFANWRGFSGGQRDMYNEVLKYGAQIVDALRNYKQPVFVYIVPNGELRGGAWVVVDPTINKDMMEMYADTQARGGVLEPEGIVEIKYRKPQLLATMARLDEKYGALKKQLETPDITADQKAEVQKQLDAREQELLPIYQQIAIQFADLHDRTGRMQAKGVIRKPIEWRRARHYFYWRVRRRLCEEYTFRKIVTASNGGMSREKMFNLVKQWFENDHASVSFDDADEMVAEWFDKRASVIEQRINKLKSEAVKEQIISLAAADQEAVLDGFASILQNMSEETKADILKKINSMI

SEQ ID NO: 14 - protein, 2223 aa, Absidia repens
MVDHKSLPSHFLGGNSVEKAPQDPVKDFVEAHEGHTVISKVLIANNGMAAMKEIRSVRKWAYETFGNERAIEFTVMATPEDLKANAEYIRMADNYVEVPGGSNNNNYANVDLIVDVAERTAVHAVWAGWGHASENPRLPEMLAKSKYKCLFIGPPASAMRSLGDKISSTIVAQSADVPTMGWSGDGVTDTKLDDNGHVIVPDAAYSSACVKTAEEGLASAEKIGYPVMIKASEGGGGKGIRKVDDASTFKQSFHQVQGEIPGSPIFIMKLAGNARHLEVQLLADQYGNAISLFGRDCSVQRRHQKIIEEAPVTIAKPEIFEQMEKAAVRLGKLVGYVSAGTVEYLYSHYDEKFYFLELNPRLQVEHPTTEMVSGVNLPAAQLQIAMGIPMHRIRDIRVLYGVQPNSSSEIDFDLENPTSLQSHRRPVPKGHVIAVRITAENPDAGFKPSGGIMQELNFRSSTNVWGYFSVVSSGAMHEYADSQFGHIFAYGENRQQSRKNMVIALKELSIRGDFRTTVEYIIRLLETPDFADNTINTGWLDMLISKKLTAERPDTMLAVFCGAVTKAHMASEECWQQFKLSLEKGQVPSKETLKTVFTVDFIYENVRYNFTVTRSAPGIYALYLNGTKTQVGVRDLSDGGLLVSLNGRSHTTYSREEVQATRLMIDGKTCLLEKESDPTQLRSPSPGKLVSLLLENGDHIKSGEAYAEIEVMKMYMPLVASEDGHVQFIKQVGATLEAGDIIGILSLDDPSRVKHALPFTGKVPTYGPPHIVGDKPHQRFSATKNVLEYVLQGYDNQALIQTVVKDLSAILRDPELPYSEMNAIMSVLSGRIPQRLEQQLHAYVEQSHGAQKEFPAHELNQLIESFARDNLTTQSEANAFKTSVAPIVDITNRYSKGLKQHEYAVYVDLMEQYYDVEVLFRSQNRDEEVILSLRDQNKDDLEKVLGIILSHAKVNIKNNLVLMLLDIVYPSTSADALDKCFLPILKRLSEIDSRATQKVTLKAREYLILCQLPSYEERQAQMYNILKSSVTESVYGGGSEYRTPSYDAFKDLIDTKFNVFDVLPNFFYHEDSYIALAALEVYCRRSYHAYKILDVAYNLEHQPYIIAWKFLLQSAVGLGDSNKRIASYSDLTFLLNKTEEEPVRTGAMTAVHSLDDLQAQLPRILSAFEEEPLPPMMQHKVSESKEQRMENILNIAVRADANDVDGANYWRPKIASLISAHTAEFRKANLRRITVVVCRANQWPDYYTFREGQDYLEDETIRHIEPAMAYQLELARLSNFDIKPCFIENRQMHVYYAVAKENPSDCRFFIRALVRPGRVKNSMRTADYLISESDRLLNDILDTLEIVSHEYKNSDCNHLFINFIPTFAIEADEVEHALKDFVDRHGKRLWKLRVTGAEIRFNIQSKRPDAPIIPLRFTVDNVSGFILKVDVYQEVKTEKSGWVLKSVGKIPGSMHMQPLSIPHPTKEWLQPRRYKAHLMGTTYVYDFPELFRQAVNNQWAQAMKNDASLKLPNQVVEAKELVLDEDNNLQEIDRAPGTNTVGMVAWLLTLRTPDYPRGRRVVAIANDITFKIGSFGVQEDMVFYKASEYAREMGLPRVYLSANSGARIGLADELISRFHAAWKDESNPSQGFNYLYLLPEEYENIVHSGDAKSVLVEEIEEAGEKRFRITDVIGHTDGLGVENLRGSGLIAGATSRAYDDIFTITLVTCRSVGIGAYLVRLGQRTVQNEGQPIILTGAPALNKVLGREVYTSNLQLGGTQIMYKNGVSHLTAENDLEGIVKITQWLSYVPEFRGAPVTMRLGADPVDREIEYMPPKGPSDPRFFLTGKNENGKWLSGFFDHGSFVETLSGWARTVVVGRARLGGIPMGVVAVETRTVENIVPADPANADSQEQVFMEAGGVWFPNSAYKTAQAINDFNKGEQLPLIIFANWRGFSGGQRDMYHEVLKYGAQIVDALSNYKQPVFVYVVPNGELRGGAWVVVDPTINEDYMEMYADVQARGGVLEPEGIVEIKYRRPQLLATMERLDPTYADLKRQLNELLGAEDSEKKTELKQKVEAREQELLPVYQQIAIQFADLHDRAGRMEAKGVIRKPLEWRYARRYFYWRVRRRLMEEYTYRKMVDANSRLSRKEMQTLLQQWYHSDVSDATTESYQSNDQGVADWLDKRGDLIDQRVAKLKSDSCSEQIVSLGAVDQDAVVEGFSKLLEGLSVDEQKEILRKLTTRF

SEQ ID NO: 15 - protein, 2225 aa, Absidia glauca
MVDHKSLPSHFLGGNSVEKAPQDPVKEFVEAHEGHTVISKVLIANNGMAAMKEIRSVRKWAYETFGNERAIEFTVMATPEDLKANAEYIRMADNYVEVPGGSNNNNYANVDLIVDVAERTAVHAVWAGWGHASENPRLPEMLAKSKYKCLFIGPPASAMRSLGDKISSTIVAQSADVPTMGWSGDGVTDTALDNNGHVIVPDDAYSSACVKTAEEGLASADKIGYPVMIKASEGGGGKGIRKVDDPSTFKQAFHQVQGEIPGSPIFIMKLAGNARHLEVQLLADQYGNAISLFGRDCSVQRRHQKIIEEAPVTIAKPEIFEQMEKAAVRLGKLVGYVSAGTVEYLYSHYDEKFYFLELNPRLQVEHPTTEMVSGVNLPAAQLQIAMGIPMHRIRDIRVLYGVQPNSSSEIDFDLENPTSLQSHRRPVPKGHVIAVRITAENPDAGFKPSGGIMQELNFRSSTNVWGYFSVVSSGAMHEYADSQFGHIFAYGENRQQSRKNMVIALKELSIRGDFRTTVEYIIRLLETPDFAENTINTGWLDMLISKKLTAERPETMLAIFCGAVTKAHMASEECWQQYKLSLEKGQVPSKETLKTVFTVDFIYESVRYNFTVTRSAPGIYALYLNGTKTQVGVRDLSDGGLLVSLNGRSHTTYSREEVQATRLMIDGKTCLLEKESDPTQLRSPSPGKLVSLLLENGDHIKSGEAYAEIEVMKMYMPLVASEDGHVQFIKQVGATLEAGDIIGILSLDDPSRVKHALPFTGKVPKFGPPHIVGDKAHQRFTATKNVLEYVLQGYDNQALIQTVVKDLSAILRDPELPYSEMTAVMSVLSGRIPGRLEQQLHSFVDQANEAKRPFPAQEISQTIENFARENLTTQSEANAYKTAVTPIVEIATRYSKGLKQHEYSVYVDLMEQYYDVEVLFGSQSREEEVILSLRDQNKDDLEKVLGIILSHAKVNIKNNLVLMLLDIVYPSTSSDALDKCFLPILKRLSEIDSRATQKVTLKAREYLILCQLPSYEERQTQMYNILKSSVTESVYGGGSEYRTPSYDAFKDLIDTKFNVFDVLSNFFYHDDSYIALAALEVYCRRSYHAYKILDVAYNLEHQPYIIAWKFLLQSAVGLGDNNKRIASYSDLTFLLNKTEEEPVRTGAMTAVHSLDELQAELPRILSAFEEEPLPPMLMNNKETAEPKEERMENILNIAVRADANDVDGANYWRPKIASLISAHTAEFRKANLRRITVVVCRANQWPDYYTFREGQDYLEDETIRHIEPAMAYQLELARLSNFDIKPCFIENRQMHVYYAVAKENPSDCRFFIRALVRPGRVKNSMRTADYLISESDRLLNDILDTLEIVSHEYKNSDCNHLFINFIPTFAIEADEVEHALKDFVDRHGKRLWKLRVTGAEIRFNIQSKRPDAPIIPLRFTVDNVSGFILKVDVYQEVKTEKSGWVLKSVGKIPGSMHMQPLSVPHPTKEWLQPRRYKAHLMGTTYVYDFPELFRQAVNNQWAHAMKSDSALKLPNQVVEAKELVLDDDNNLQEIDRAPGTNTVGMVAWLLTLRTPDYPRGRRVIAIANDITFKIGSFGVQEDMVFYKASEHARNLGLPRVYLSANSGARIGLADELISRFRAAWKDDANPAQGFKYLYLLPDEYESLVRSGDSKSVLVEQIEEAGEKRFRITDVIGHTDGLGVENLRGSALIAGATSRAYEDIFTITLVTCRSVGIGAYLVRLGQRTVQNEGQPIILTGAPALNKVLGREVYTSNLQLGGTQIMYKNGVSHLTAENDLEGIVKITQWLSYVPEHRGAPVTMRVGSDPVDREIEYMPPKGPSDPRFFLTGKNENGKWLSGFFDHGSFVETLSGWARTVVVGRARLGGIPMGVVAVETRTVENIVPADPANADSQEQVFMEAGGVWFPNSAYKTAQAINDFNKGEQLPLIIFANWRGFSGGQRDMYHEVLKYGAQIVDALTNYKQPVFVYVIPNGELRGGAWVVIDPTINEDYMEMYADVQARGGVLEPEGIVEIKYRRPQLLATMERLDPTYADLKRQLNELLGAEDSDKKTEIKQLVEAREQELLPVYQQIAIQFADLHDRAGRMEAKGVIRKPLEWRYARHYFYWRVRRRLMEEYTFRKMVDANSRLSRKDMQGLLQQWYFADTTGATTDSYEGDDHGVSDWFDKRGDLIDQRVAKLKSEGYTEQVTLLGAVDQDAVVEGFSKMLDGLTVDEQKEVLRKLTARF

SEQ ID NO: 16 - protein, 2221 aa, Phycomyces blakesleeanus NRRL 1555(-)
MVEHSSVPPQFLGGNSVEKAAQGAVRDFVVASEGHTVISKVLIANNGMAAMKEIRSVRKWAYETFGDERAIEFTVMATPEDLKANAEYIRMADNYVEVPGGSNNNNYANVDLIVDIAERTGVHAVWAGWGHASENPRLPDMLATSKYKCVFIGPPASAMRSLGDKISSTIVAQSANVPTMGWSGDGVTDTVADANGHVVVPPEAYASACVKTAEEGLVAADKIGYPIMIKASEGGGGKGIRKVDGPETFKQCFAQVQGEIPGSPIFIMKLAGNARHLEVQLLADQYGNAISLFGRDCSVQRRHQKIIEEAPVTIAKPDVFEQMEKAAVRLAKLVGYVSAGTVEYLYSHHDEQFYFLELNPRLQVEHPTTEMVSGVNLPAAQLQIAMGIPLHRIKDIRVLYGVQPNSGSEIDFEFSSPTSLQSTRRPVPKGHVIAVRITAENPDAGFKPSSGIMQELNFRSSTNVWGYFSVVSAGGLHEYADSQFGHIFAYGENRQQARKNMVIALKELSIRGDFRTTVEYIIRLLETPDFEENTINTGWLDMLITKKLTAERPDCMLAVFCGAVTKAHSASQECWQQYKQCLEKGQVPGKGTLKTVFSVDFIYENVRYNFTVTHSAPSIYTLYLNGTKTQVGVRDLSDGGLLVSIGGKSHTTYSREEVQATRLMIDGKTCLLEKESDPTQLRSPSPGKLVSLLLENGDHVKAGEAYAEIEVMKMYMPLVAGEDGHIQFIKQVGATLEAGDIIGILSLDDPSRVKHALPFTGQVPVFGPPYISGDKPIQRFQDTKHILEYILQGYDNQALAQTVVKDLTDILRNPELPYSDMTQTMSVLSGRIPQRLEQALQALQASSAEAKKEFPAVELQKIVENFARDNITTHSEVNAYKTATEPLTTVFERYSHGLKQYEYSVYVELMEKYYDVEILFSTQQREEEVILSLRDQNKDDLEKILSIILSHTKVNVKNNLILMLLDIVGPASATGGAIDKYFVPILKRLSEIDSRATQKVALRAREFLILCQLPSYEERQGQMLQILKSSVTESVYGGGVEYRTPSLDVFKDLIDTKFNVFDVLPNFFYYDDPYIALAAIEVYCRRSYHAYKILDVAYNLERQPYIVAWKFLLQTAGHGLNSDQRVASYSDLTFLLNKTEEEPIRTGAMTACKSLEDLEAELPRILTAFEEEPLPPMLKRSGPKEERMENILNVAVYSDVNKDDAYWRPKVAELIRRHTAEFRKAHLRRLSVVVCRPNQWPDYYTFRERENYTEDETIRHIEPAMAYQLELTRLSNFEIKPCFIENRQMHVYYAVAKENPSDCRFFIRALVRPGRVKNSMRTADYLISESDRLLNDILDTLEIVSHEYKNSDCNHLFINFIPTFAIEADEVQHALKDFIDRHGKRLWKLRVTGAEIRFNIQSKRPDAPIIPLRFTVDNVSGFILKMDVYQEVKTEKNGWVLKSVGKIPGAMHMQSLSTPYPTKEWLQPRRYKAHLMGTTYVYDFPELFRQALHNQWALAIKKDSNLKCPSQVVEAKELVLDEDEVLQEIDRAPGTNTVGMVAWILTLRTPEYPRGRRVIAIANDITFKIGSFGVEEDTVFFKASELARELGLPRIYLSANSGARIGLADELIGQFRAAWKDNANPSAGFKYLYLSPKEYILLKQTNQLESVLVEEIEEEGEKRMKITDIIGQMDGIGVENLRGSGRIAGATSRAYDDIFTITLVTCRSVGIGAYLVRLGQRTVQNEGQPIILTGAPALNKVLGREVYTSNLQLGGTQIMYKNGVSHLTAENDLQGIEKIAQWLSYVPEVRGAPVLMRVGLDPVDREIEYMPPKGPSDPRLFLAGKQENGKWLSGFFDHDSFVETLSGWARTVVVGRARLGGIPMGVVAVESRTVENIVPADPANADSTEQVFMEAGGVWYPNSAYKTAQAINDFNKGEQLPLMIFANWRGFSGGQRDMYHEVLKYGAQIVDALSNYKQPVFVYIIPNGELRGGAWVVVDPTINEDMMEMYADNLARGGVLEPEGIVEIKYRKPQLLATMARLDERYATLKREFEEASADKKEDAKRLLEAREQELMPVYQQIAVQFADLHDRVGRMSAKNVIRRPIEWRHARKYFFWRVRRRLFEEYAIREISAATKGKMERNKMCSHLEQWFLADTNSLVEDWKNGDEQVSEWFEKRAELIKQRISKLRSEALREHVASLGAVDKEAVVDGFGKILESMSAEERKSVLRKLEFLSGSLSQ

SEQ ID NO: 17 - protein, 2213 aa, Hesseltinella vesiculosa
MVDHKSLPGHFLGGNSVDTAPQDPVCEFVKSHQGHTVISKVLIANNGMAAMKEIRSVRKWAYETFGNERAIEFTVMATPEDLKANAEYIRMADNYIEVPGGTNNNNYANVELIVDVAERTGVHAVWAGWGHASENPRLPEMLAKSKNKCVFIGPPASAMRSLGDKISSTIVAQSADVPTMGWSGDGVSETTTDHNGHVLVNDDVYNSACVKTAEAGLASAEKIGFPVMIKASEGGGGKGIRKVEDPSTFKQAFAQVQGEIPGSPIFIMKLAGNARHLEVQLLADQYGNAISLFGRDCSVQRRHQKIIEEAPVTIAKPDIFEQMEKAAVRLGKLVGYVSAGTVEYLYSHHDEKFYFLELNPRLQVEHPTTEMVSGVNLPAAQLQIAMGIPMHRIRDIRVLYGVQPNSASEIDFDLEHPTALQSQRRPMPKGHVIAVRITAENPDAGFKPSGGVMQELNFRSSTNVWGYFSVVSSGAMHEYADSQFGHIFAYGENRQQARKNMVIALKELSIRGDFRTTVEYIIRLLETPDFTDNTINTGWLDMLISKKLTAERPDTMLAVFCGAVTKAHLASVECWQQYKNSLERGQIPSKESLKTVFTVDFIYENIRYNFTVTRSAPGIYTLYLNGTKTQVGVRDLSDGGLLISLNGRSHTTYNREEVQATRLMIDGKTCLLEKESDPTQLRSPSPGKLVSLLLENGDHIRTGQAYAEIEVMKMYMPLVASEDGHVQFIKQVGATLEAGDIIGILSLDDPSRVKHALPFTGQVPKYGLPHLTGDKPHQRFTHLKQTLEYVLQGYDNQGLIQTIVKELSEVLNNPELPYSELSASMSVLSGRIPGRLEQQLHDLINQAHAQNKGFPAVDIQQAIDTFARDHLTTQAEVNAYKTAVAPIMTIAASYSNGLKQHEHSVYVDLMEQYYNVEVLFNSNQSRDEEVILALRDQHKDDLEKVINIILSHAKVNIKNNLILMLLDIIYPATSSEALDRCFLPILKHLSEIDSRGTQKVTLKAREYLILCQLPSLEERQSQMYNILKSSVTESVYGGGTEYRTPSYDAFKDLIDTKFNVFDVLPNFFYHPDSYVSLAALEVYCRRSYHAYKILDVAYNLEHQPYIVAWKFLLQSSAGGGFNNQRIASYSDLTFLLNKTEEEPIRTGAMVALKTLEELEAELPRIMTAFEEEPLPPMLMKQPPPDKTEERMENILNISIQGQDMEDDTLRKNMTTLIQAHSDAFRKAALRRITLVVCRDNQTPDYYTFRERNGYEEDETIRHIEPALAYQLELARLSNFDIKPCFIENRQMHVYYAVAKENPSDCRFFIRALVRPGRVKSSMRTADYLISESDRLLTDILDTLEIVSHDYKNSDCNHLFINFIPTFAIEADEVETALKDFVDRHGKRLWKLRVTGAEIRFNIQSKRPDAPVIPLRFTVDNVSGYILKVDVYQEVKTDKNGWILKSVGKIPGAMHMQPLSTPYPTKEWLQPRRYKAHLMGTTYVYDFPELFRQAIHNLWAQACKADAAVKIPSQVIEAKELVLDDDNQLQAIDRAPGTNTVGMVAWLLTLRTPDYPRGRRVIAIANDITFKIGSFGVQEDLVFYKASEYARELGVPRVYLSANSGARIGLADELISRFHVAWKDEDQPGSGFEYLYLLPEEYDALIQQGDAQSVLVQEVQDKGERRFRITDIIGHTDGLGVENLRGSGLIAGATSRAYDDIFTITLVTCRSVGIGAYLVRLGQRTVQNEGQPIILTGAPALNKVLGREVYTSNLQLGGTQIMYKNGVSHLTAENDLEGINKIMQWLSFVPECRGAPLPMRAGADPIDREIEYLPPKGPSDPRFFLAGKQENGKWLSGFFDHGSFVETLSGWARTVVVGRARLGGIPMGVVAVETRTVENIVPADPANADSQEQVVMEAGGVWFPNSAYKTAQAINDFNKGEQLPLMIFANWRGFSGGQRDMYNEVLKYGAQIVDALSNYKQPVFVYVVPNGELRGGAWVVVDSTINEDMMEMYADTQARGGVLEPEGIVEIKYRRPQLLATMERLDPVYSDLKRRLAALDDSQKEQADELIAQVEAREQALLPVYQQVAIQFADLHDRSGRMEAKGVIRKTLEWRTARHYFYWRVRRRLLEEYAIRKMDESRDQAKTLLQQWFQADTNLDDFDKNDQAVVAWFDAKNLLLDQRIAKLKSEKLKDHVVQLASVDQDAVVEGFSKLMESLSVDQRKEVLHKLATRF

SEQ ID NO: 18 - protein, 2216 aa, Rhizopus stolonifera
MVEHRSLPGHFLGGNSLESAPQGPVKDFVQAHEGHTVISKVLIANNGMAAMKEIRSVRKWAYETFGNERAIEFTVMATPEDLKANAEYIRMADNFVEVPGGSNNNNYANVELIVDVAERTAVHAVWAGWGHASENPRLPEMLAKSKHKCLFIGPPASAMRSLGDKISSTIVAQSAQVPTMGWSGDGITETEFDAAGHVIVPDNAYNEACVKTAEQGLKAAEKIGFPVMIKASEGGGGKGIRMVKDGSNFAQLFAQVQGEIPGSPIFIMKLAGNARHLEVQLLADQYGNAISLFGRDCSVQRRHQKIIEEAPVTIAKPDVFEQMEKAAVRLGKLVGYVSAGTVEYLYSHHDDQFYFLELNPRLQVEHPTTEMVSGVNLPAAQLQIAMGIPLHRIRDIRVLYGVQPNSASEIDFGFEHPTSLTSHRRPTPKGHVIACRITAENPDAGFKPSSGIMQELNFRSSTNVWGYFSVVSAGGLHEYADSQFGHIFAYGENRQQARKNMVIALKELSIRADFRSTVEYIIRLLETPDFEENTINTGWLDMLISKKLTAERPDTMLAVFCGAVTKAHMASLDCFQQYKQSLEKGQVPSKGSLKTVFTVDFIYEEVRYNFTVTQSAPGIYTLYLNGTKTQVGIRDLSDGGLLISIDGKSHTTYSRDEVQATRMMVDGKTCLLEKESDPTQLRSPSPGKLVNLLVENGDHLNAGDAYAEIEVMKMYMPLIATEDGHVQFIKQAGATLEAGDIIGILSLDDPSRVKHALPFNGTVPAFGAPHITGDKPVQRFNATKLTLQHILQGYDNQALVQTVVKDFADILNNPDLPYSELNSVLSALSGRIPQRLEASIHKLADESKAANQEFPAAQFEKLVEDFAREHITLQSEATAYKNSVAPLSSIFARYRNGLTEHAYSNYVELMEAYYDVEILFNQQREEEVILSLRDQHKDDLDKVLAVTLSHAKVNIKNNVILMLLDLINPVSTGSALDKYFTPILKRLSEIESRATQKVTLKARELLILCQLPSYEERQAQMYQILKNSVTESVYGGGSEYRTPSYDAFKDLIDTKFNVFDVLPHFFYHADPYIALAAIEVYCRRSYHAYKILDVAYNLEHKPYVVAWKFLLQTAANGIDSNKRIASYSDLTFLLNKTEEEPIRTGAMTACNSLADLQAELPRILTAFEEEPLPPMLQRNAAPKEERMENILNIAVRADEDMDDTAFRTKICEMITANADVFRQAHLRRLSVVVCRDNQWPDYYTFRERENYQEDETIRHIEPAMAYQLELARLSNFDIKPCFIENRQMHVYYAVAKENPSDCRFFIRALVRPGRVKSSMRTADYLISESDRLLTDILDTLEIVSHEYKNSDCNHLFINFIPTFAIEADDVEHALKDFVDRHGKRLWKLRVTGAEIRFNVQSKKPDAPIIPMRFTVDNVSGFILKVEVYQEVKTEKSGWILKSVNKIPGAMHMQPLSTPYPTKEWLQPRRYKAHLMGTTYVYDFPELFRQSVQNQWTQAIKRNPLLKQPSHLVEAKELVLDEDDVLQEIDRAPGTNTVGMVAWIMTIRTPEYPSGRRIIAIANDITFKIGSFGVAEDQVFYKASELARALGIPRIYLSANSGARIGLADELISQFRAAWKDASNPTAGFKYLYLTPAEYDVLAQQGDAKSVLVEEIQDEGETRLRITDVIGHTDGLGVENLKGSGLIAGATSRAYDDIFTITLVTCRSVGIGAYLVRLGQRTIQNEGQPIILTGAPALNKVLGREVYTSNLQLGGTQIMYKNGVSHLTAENDLEGIAKIVQWLSFVPDVRNAPVSMRLGADPIDRDIEYTPPKGPSDPRFFLAGKSENGKWLSGFFDQDSFVETLSGWARTVVVGRARLGGIPMGVVSVETRTVENIVPADPANSDSTEQVFMEAGGVWFPNSAYKTAQAINDFNKGEQLPLMIFANWRGFSGGQRDMYNEVLKYGAQIVDALSNYKQPVFVYIIPNGELRGGAWVVVDPTINKDMMEMYADNNARGGVLEPEGIVEIKYRKPALLATMERLDATYASLKKQLAEEGKTDEEKAALKVQVEAREQELLPVYQQISIQFADLHDRAGRMKAKGVIRKALDWRRARHYFYWRVRRRLCEEYTFRKIVTATSAAPMPREQMLDLVKQWFTNDNETVNFEDADELVSEWFEKRASVIDQRISKLKSDATKEQIVSLGNADQEAVIEGFSQLIENLSEDARAEILRKLNSRF

SEQ ID NO: 19 - protein, 2216 aa, Lichtheimia ramose; identical to SEQ ID NO: 2

SEQ ID NO: 20 - protein, 2216 aa, Lichtheimia ramose; identical to SEQ ID NO: 3

SEQ ID NO: 21 - protein, 2216 aa, Lichtheimia corymbifera JMRC:FSU:9682; identical to SEQ ID NO: 4

SEQ ID NO: 22 - protein, 2216 aa, Absidia glauca; identical to SEQ ID NO: 5

SEQ ID NO: 23 - protein, 2216 aa, Syncephalastrum racemosum; identical to SEQ ID NO: 6

SEQ ID NO: 24 - protein, 2213 aa, Mucor circinelloides f. circinelloides 1006PhL; identical to SEQ ID NO: 7

SEQ ID NO: 25 - protein, 2215 aa, Mucor circinelloides f. lusitanicus CBS 277.49; identical to SEQ ID NO: 8

SEQ ID NO: 26 - protein, 2216 aa, Mucor ambiguous; identical to SEQ ID NO: 9

SEQ ID NO: 27 - protein, 2216 aa, Lichtheimia corymbifera JMRC:FSU:9682; identical to SEQ ID NO: 10

SEQ ID NO: 28 - protein, 2216 aa, Bifiguratus adelaidae; identical to SEQ ID NO: 11

SEQ ID NO: 29 - protein, 2216 aa, Endogone sp. FLAS-F59071; identical to SEQ ID NO: 12

SEQ ID NO: 30 - protein, 2216 aa, Glomus cerebriforme; identical to SEQ ID NO: 13

SEQ ID NO: 31 - protein, 2223 aa, Jimgerdemannia flammicorona; identical to SEQ ID NO: 14

SEQ ID NO: 32 - protein, 2225 aa, Lobosporangium transversal; identical to SEQ ID NO: 15

SEQ ID NO: 33 - protein, 2221 aa, Rhizophagus irregularis; identical to SEQ ID NO: 16

SEQ ID NO: 34 - protein, 2213 aa, Rhizophagus irregularis; identical to SEQ ID NO: 17

SEQ ID NO: 35 - protein, 2216 aa, Rhizophagus irregularis; identical to SEQ ID NO: 18

SEQ ID NO: 36 - protein, 2216 aa, Rhizophagus irregularis; identical to SEQ ID NO: 2

SEQ ID NO: 37 - protein, 2216 aa, Mortierella elongata AG-77; identical to SEQ ID NO: 3

SEQ ID NO: 38 - protein, 2216 aa, Mortierella verticillata NRRL 6337; identical to SEQ ID NO: 4

SEQ ID NO: 39 - protein, 2216 aa, Diversispora epigaea; identical to SEQ ID NO: 5

SEQ ID NO: 40 - protein, 2216 aa, Rhizophagus irregularis; identical to SEQ ID NO: 6

SEQ ID NO: 41 - protein, 2213 aa, Rhizophagus clarus; identical to SEQ ID NO: 7

SEQ ID NO: 42 - protein, 2215 aa, Basidiobolus meristosporus CBS 931.73; identical to SEQ ID NO: 8

SEQ ID NO: 43 - protein, 2216 aa, Gigaspora rosea; identical to SEQ ID NO: 9

SEQ ID NO: 44 - protein, 2216 aa, Rhizophagus irregularis; identical to SEQ ID NO: 10

SEQ ID NO: 45 - protein, 2216 aa, Rhizophagus diaphanus [Rhizophagus sp. MUCL 43196]; identical to SEQ ID NO: 11

SEQ ID NO: 46 - protein, 2216 aa, Basidiobolus meristosporus CBS 931.73; identical to SEQ ID NO: 12

SEQ ID NO: 47 - protein, 2216 aa, Saitoella complicata NRRL Y-17804; identical to SEQ ID NO: 13

SEQ ID NO: 48 - protein, 2223 aa, Saitoella complicata NRRL Y-17804; identical to SEQ ID NO: 14

SEQ ID NO: 49 - protein, 2225 aa, Basidiobolus meristosporus CBS 931.73; identical to SEQ ID NO: 15

SEQ ID NO: 50 - protein, 2221 aa, Coleophoma cylindrospora; identical to SEQ ID NO: 16

SEQ ID NO: 51 - protein, 2213 aa, Dactylellina haptotyla CBS 200.50; identical to SEQ ID NO: 17

SEQ ID NO: 52 - protein, 2216 aa, Pyronema omphalodes CBS 100304; identical to SEQ ID NO: 18

SEQ ID NO: 53 - protein, 2216 aa, Aspergillus fischeri NRRL 181; identical to SEQ ID NO: 2

SEQ ID NO: 54 - protein, 2216 aa, Coleophoma crateriformis; identical to SEQ ID NO: 3

SEQ ID NO: 55 - protein, 2216 aa, Aspergillus turcosus; identical to SEQ ID NO: 3

SEQ ID NO: 56 - protein, 2216 aa, Aspergillus lentulus; identical to SEQ ID NO: 5

SEQ ID NO: 57 - protein, 2216 aa, Byssochlamys spectabilis; identical to SEQ ID NO: 6

SEQ ID NO: 58 - protein, 2213 aa, Aspergillus fumigatus A1163; identical to SEQ ID NO: 7

SEQ ID NO: 59 - protein, 2215 aa, Aspergillus udagawae; identical to SEQ ID NO: 8

SEQ ID NO: 60 - protein, 2216 aa, Aspergillus thermomutatus; identical to SEQ ID NO: 9

SEQ ID NO: 61 - protein, 2216 aa, Aspergillus fumigatus Af293; identical to SEQ ID NO: 10

SEQ ID NO: 62 - protein, 2216 aa, Botrytis tulipae; identical to SEQ ID NO: 11

SEQ ID NO: 63 - protein, 2216 aa, Morchella conica CCBAS932; identical to SEQ ID NO: 12

SEQ ID NO: 64 - protein, 2216 aa, Botrytis cinerea B05.10; identical to SEQ ID NO: 13

SEQ ID NO: 65 - protein, 2223 aa, Aspergillus fumigatus var. RP-2014; identical to SEQ ID NO: 14

SEQ ID NO: 66 - protein, 2225 aa, Botrytis galanthina; identical to SEQ ID NO: 15

SEQ ID NO: 67 - protein, 2221 aa, Botrytis elliptica; identical to SEQ ID NO: 16

SEQ ID NO: 68 - protein, 2213 aa, Byssochlamys spectabilis No. 5; identical to SEQ ID NO: 17

SEQ ID NO: 69 - protein, 2216 aa, Xylona heveae TC161; identical to SEQ ID NO: 18

SEQ ID NO: 70 - protein, 2216 aa, Botrytis cinerea BcDW1; identical to SEQ ID NO: 2

SEQ ID NO: 71 - protein, 2216 aa, Phialocephala scopiformis; identical to SEQ ID NO: 3

SEQ ID NO: 72 - protein, 2216 aa, Sclerotinia sclerotiorum 1980 UF-70; identical to SEQ ID NO: 4

SEQ ID NO: 73 - protein, 2216 aa, Amorphotheca resinae ATCC 22711; identical to SEQ ID NO: 5

SEQ ID NO: 74 - protein, 2216 aa, Aspergillus oryzae RIB40; identical to SEQ ID NO: 6

SEQ ID NO: 75 - protein, 2213 aa, Aspergillus parasiticus SU-1; identical to SEQ ID NO: 7

SEQ ID NO: 76 - protein, 2215 aa, Phialocephala subalpine; identical to SEQ ID NO: 8

SEQ ID NO: 77 - protein, 2216 aa, Rutstroemia sp. NJR-2017a WRK4; identical to SEQ ID NO: 9

SEQ ID NO: 78 - protein, 2216 aa, Rutstroemia sp. NJR-2017a BVV2; identical to SEQ ID NO: 10

SEQ ID NO: 79 - protein, 2216 aa, Aspergillus costaricaensis CBS 115574; identical to SEQ ID NO: 11

SEQ ID NO: 80 - protein, 2216 aa, Pezoloma ericae; identical to SEQ ID NO: 12

SEQ ID NO: 81 - protein, 2216 aa, Aspergillus brasiliensis CBS 101740; identical to SEQ ID NO: 13

SEQ ID NO: 82 - protein, 2223 aa, Aspergillus vadensis CBS 113365; identical to SEQ ID NO: 14

SEQ ID NO: 83 - protein, 2225 aa, Aspergillus heteromorphus CBS 117.55; identical to SEQ ID NO: 15

SEQ ID NO: 84 - protein, 2221 aa, Aspergillus piperis CBS 112811; identical to SEQ ID NO: 16

SEQ ID NO: 85 - protein, 2213 aa, Rutstroemia sp. NJR-2017a BBW; identical to SEQ ID NO: 17

SEQ ID NO: 86 - protein, 2216 aa, Drechslerella stenobrocha 248; identical to SEQ ID NO: 18

SEQ ID NO: 87 - protein, 2216 aa, Botrytis hyacinthi; identical to SEQ ID NO: 2

SEQ ID NO: 88 - protein, 2216 aa, Aspergillus bombycis; identical to SEQ ID NO: 3

SEQ ID NO: 89 - protein, 2216 aa, Glonium stellatum; identical to SEQ ID NO: 4

SEQ ID NO: 90 - protein, 2216 aa, Botryotinia convolute; identical to SEQ ID NO: 5

SEQ ID NO: 91 - protein, 2216 aa, Aspergillus clavatus NRRL 1; identical to SEQ ID NO: 6

SEQ ID NO: 92 - protein, 2213 aa, Aspergillus neoniger CBS 115656; identical to SEQ ID NO: 7

SEQ ID NO: 93 - protein, 2215 aa, Erysiphe pulchra; identical to SEQ ID NO: 8

SEQ ID NO: 94 - protein, 2216 aa, Penicillium chrysogenum; identical to SEQ ID NO: 9

SEQ ID NO: 95 - protein, 2216 aa, Penicillium rubens Wisconsin 54-1255; identical to SEQ ID NO: 10

SEQ ID NO: 96 - protein, 2216 aa, Botrytis paeoniae; identical to SEQ ID NO: 11

SEQ ID NO: 97 - protein, 2216 aa, Glarea lozoyensis ATCC 20868; identical to SEQ ID NO: 12

SEQ ID NO: 98 - protein, 2216 aa, Aspergillus eucalypticola CBS 122712; identical to SEQ ID NO: 13

SEQ ID NO: 99 - protein, 2223 aa, Pseudogymnoascus sp. VKM F-4515 (FW-2607); identical to SEQ ID NO: 14

SEQ ID NO: 100 - protein, 2213 aa, Aspergillus niger CBS 513.88; identical to SEQ ID NO: 17

SEQ ID NO: 101 - DNA, 6651 bp, Mucor circinelloides f. circinelloides
atggttgaacatcgctccttgccgggtcattttttaggtggtaactctttagaaagcgcaccgcagggcccggtcaaagatttcgtccaggcgcatgagggtcatactgtcattagcaaggtcctgattgcgaacaacggtatggccgcgatgaaagaaattcgtagcgttcgtaaatgggcgtatgaaacctttggtaacgaacgtgccatcgagttcacggtcatggcaacccctgaagatttgaaggcaaacgcagaatacatccgcatggcagacaactttgtcgaagtccctggtggcagcaataacaacaactacgctaatgttgaactgattgtagatgtcgctgagcgcaccgcagtgcacgccgtctgggcgggctggggtcacgcgagcgagaatccgcgcctgccggaaatgctggccaagagcaaacataagtgtttgttcatcggtccgccggcgagcgccatgcgttcgctgggtgataaaatctcctccaccattgtggcgcagagcgcccaggtgccgaccatgggttggtccggcgacggcattaccgaaaccgagtttgacgcggcgggccacgtgattgttccggataatgcgtataatgaagcgtgcgtgaaaactgcggagcaaggtttgaaagccgcagagaaaattggtttcccggtcatgatcaaagcctctgagggtggcggcggcaaaggtatccgcatggtgaaggacggcagcaacttcgcccagctgttcgctcaagtgcagggcgagattccgggcagcccgatctttatcatgaagctggctggtaatgctcgtcatctggaggtgcaactgctggcagaccagtacggtaacgccatttctctgttcggccgtgattgctccgtgcaacgtagacaccaaaaaatcattgaagaggcaccggtgactattgcgaaaccagatgtttttgagcaaatggaaaaagctgcggtgcgtctgggtaaactggttggctatgtttccgcgggtacggttgagtacctgtatagccaccacgatgaccagttctacttcctggaactgaatccgcgtctgcaagtggaacacccaaccaccgaaatggtcagcggcgtcaatctgccggcggcgcaactgcagatcgcaatgggtatcccgctgcaccgtatccgtgatattcgcgtgctgtacggcgtgcaaccgaactctgctagcgagattgattttggcttcgagcatccaacgtccttaaccagccatcgccgtccgacgccgaagggtcacgtgattgcatgccgtattaccgcagagaatccggacgcgggcttcaagccgagcagcggcatcatgcaagaactgaacttccgtagcagcaccaatgtgtggggttattttagcgttgttagcgcgggtggcttgcacgagtatgccgatagccaattcggtcacatcttcgcgtatggtgagaatcgccaacaggcacgtaagaatatggtgattgcgctgaaagaactgtccattcgcgcggatttccgctctactgtggagtacattattcgtctgctggaaacgccggactttgaggaaaatacgatcaacacgggttggcttgacatgctgatcagcaaaaagctgaccgcggagcgtccggacaccatgctggctgtgttctgtggtgcggttaccaaagcccacatggcaagcctggactgctttcaacaatataaacaaagcctggagaaaggccaagtcccgagcaagggtagcctgaaaacggtttttaccgttgatttcatttatgaagaagtgcgttacaattttaccgtgactcagagcgcgccaggtatctataccctctacctgaacggcaccaaaacccaggtcggtattcgtgatctgagcgatggtggtctgttaatcagcatcgatggtaagagccataccacctactctcgcgacgaagttcaagcgacgcgcatgatggttgacggtaagacctgtctgctggagaaagagtcagatccgacgcagctgcgcagcccgtcaccgggcaaactcgttaacctgttggtagagaacggcgaccatctgaacgctggcgacgcatacgcagagatcgaagttatgaaaatgtacatgcctctgattgcgactgaggacggccacgtacagttcattaaacaggccggcgcgaccctggaagcgggtgacatcattggtattctgtctctggacgatccgagccgtgttaaacatgcgctgccgtttaacggcaccgtcccggcgtttggtgcgccgcacatcaccggcgataaaccagttcagcgcttcaacgccacgaagctgacgctgcaacacatcctgcagggctacgataatcaagcgctggtccagaccgtggtcaaagacttcgcggatattctgaacaacccagacttgccgtacagcgagctgaactctgtcctgagcgcattgagcggtcgcatcccgcagcgcttggaagcctccatccacaaactggctgatgagtccaaagctgctaaccaagaattcccagcggcccagttcgagaaactggtcgaagattttgcacgcgagcacattacgctgcagagcgaagccaccgcatacaagaactcggtcgctccgctgagcagcatttttgcccgttaccgtaatggcttgaccgaacatgcatacagcaactacgtcgagctgatggaggcgtactatgacgttgaaattctctttaatcaacaacgtgaagaggaagtgattctgtccctgcgtgatcagcacaaagacgatctggacaaagtgctggctgttaccttgagccacgctaaggtcaatattaagaataatgtcatcctcatgctgctggacttgatcaatccggtgtcgaccggtagcgcgctggataaatattttacgccgattctgaagcgcctgagcgagatcgagtctcgtgcaacgcaaaaagtgactctgaaggcacgtgaattgctgattctgtgtcagctgccgagctacgaagagagacaggcgcaaatgtaccagattctgaagaacagcgtgaccgagtctgtgtacggcggcggtagcgaataccgcacgccgagctatgacgcgtttaaagacttaatcgacactaagttcaatgttttcgatgtgctgccgcacttcttttaccatgcggacccgtacatcgcactggcggctatcgaagtgtactgccgccgttcctatcacgcctacaaaattcttgacgtggcatataacttggagcataaaccgtacgtggtggcctggaaattcttgctgcaaacggccgcaaacggtatcgatagcaacaagcgtatcgctgcgtactccgatttgacctttctcctgaacaagaccgaagaagaaccgatccgtacgggcgcgatgaccgcgtgtaactctctggcggatctgcaagctgagctgcctcgcatcctgaccgcgtttgaggaagaaccgctgccgccgatgctgcagcgtaatgcagcgccgaaagaggaacgtatggaaaacatcctgaacatcgcagtgcgtgcagacgaagatatggacgataccgcattccgtaccaagatttgtgaaatgattaccgcgaatgctgacgtgttccgtcaagcgcacttgcgccgtctgagcgtggttgtgtgccgtgacaatcagtggccagactactacacctttcgtgaacgtgaaaattatcaagaagatgaaacgattcgtcatatcgaaccggcaatggcttaccagttggaactggcgcgtttgagcaacttcgacattaagccgtgcttcattgaaaaccgtcagatgcacgtgtactatgccgttgccaaagaaaatccgagcgattgccgtttcttcatccgtgcactggtccgtccaggtcgcgttaagagcagcatgcgtaccgcggattatctgattagcgagagcgaccgcctgctgacggacatcctggataccctggaaattgtgagccacgagtataagaatagcgactgcaatcacctgtttatcaactttatcccgaccttcgcgattgaggcagatgatgttgagcatgcgctcaaagatttcgttgatcgccatggtaaacgtctgtggaaactgcgtgtgacgggcgctgagattagattcaacgtccagagcaagaaaccggacgccccgattatcccgatgcgcttcaccgtggataatgtgagcggctttattctgaaagttgaagtttatcaagaagtcaaaaccgaaaagtccggttggattctgaaaagcgtcaacaagatcccgggtgcaatgcacatgcagccactgagcacgccgtatccgacgaaagagtggctgcagccgcgtcgttacaaggcccacctgatgggtacgacctacgtctatgactttccggaactgtttcgtcaaagcgttcagaaccaatggacccaagcgattaagcgcaatccgctgttgaaacagccgagccacttggtggaagctaaagaactggtgttggacgaagatgacgttctgcaagaaatcgaccgtgccccgggtacgaatactgtgggcatggttgcatggatcatgaccatccgtacgccggagtatcctagcggtcgtcgtatcattgcgattgcgaacgacatcacgtttaagatcggtagcttcggtgtcgccgaggaccaagttttttataaagcttccgagctggcacgcgcgctgggcatccctcgcatctatctgagcgcgaacagcggtgcccgcatcggtctggcagacgaactgatctcccagttccgtgcggcgtggaaagatgccagcaatccgacggccggtttcaagtacttgtatctgacgccagccgagtacgatgtcctggcccaacagggtgacgcgaagtctgttctggttgaggagatccaagacgagggcgaaactcgtctgcgcattactgacgtcatcggtcacaccgatggcctgggtgtggagaacctgaagggtagcggtctgatcgcgggcgcaacctcgcgcgcgtatgacgatatctttacgatcactctggttacgtgtcgtagcgttggtattggtgcgtaccttgtccgcctgggccagcgtacgattcagaatgagggccagccgatcatcctgaccggcgctccggccctgaataaagtactgggtcgtgaagtttatacgagcaatttgcagttgggcggcacgcaaatcatgtacaagaatggtgtgagccacctgacggctgagaatgacctggaaggcattgctaaaatcgtccagtggctgagctttgtaccagatgtccgcaacgcaccggttagcatgcgtctgggtgcagacccgattgatcgtgatattgagtacaccccgccgaagggtccgtcagacccgcgtttctttctggcgggtaagagcgagaatggtaagtggctgtcgggtttcttcgaccaggacagcttcgtcgaaaccctgagcggctgggccagaaccgttgtcgttggtcgtgcacgtctgggtggcatcccgatgggtgtcgtgagcgtcgaaacgcgtactgttgagaacattgtgccggcggatccggcgaactctgatagcaccgagcaagttttcatggaggccggtggcgtctggttcccgaactcagcttacaagactgcacaggcaattaatgattttaataaaggtgagcaactgccgttgatgattttcgcgaattggcgtggcttctccggtggccagcgtgatatgtacaacgaagtgctgaaatatggtgcacagatcgttgacgcactgagcaattacaagcaaccggtgtttgtgtatattattccgaatggtgagttgcgtggcggcgcatgggttgttgtcgatcctaccatcaacaaagatatgatggaaatgtacgcggacaataatgcccgcggtggcgttctggagcctgagggtatcgtcgagatcaagtatcgtaaaccggcgctgctggcgaccatggaacgtctggacgcgacgtacgcgagcctgaagaaacagctggcggaagagggcaagaccgacgaagagaaagctgcactgaaagtacaggtcgaggctcgcgagcaagaactcttgccagtctatcagcaaatctccattcagttcgcggatctgcatgaccgtgcgggtcgtatgaaagctaagggcgtgattcgtaaagcgctggattggcgccgtgcccgtcattatttttactggcgcgtccgtcgccgtctgtgcgaggaatacaccttccgcaaaattgtgaccgcgacctccgcggctccgatgccgcgcgaacaaatgctggatctggtgaagcaatggttcactaacgataacgaaaccgttaactttgaagatgcagatgaactggtcagcgagtggttcgagaagcgtgcgagcgtgatcgaccagcgtatcagcaagctgaagtccgacgccaccaaagaacagatcgttagcctgggcaatgccgatcaagaagccgttatcgagggctttagccaattgattgagaatttgagcgaagatgcgcgcgcagaaattctgcgtaagttgaacagccgtttctag

SEQ ID NO: 102 - protein, 309 aa, E. coli K-12 MG1655 [sequence omitted]

SEQ ID NO: 103 - protein, 151 aa, E. coli K-12 MG1655
MTTNTHTLQIEEILELLPHRFPFLLVDRVLDFEEGRFLRAVKNVSVNEPFFQGHFPGKPIFPGVLILEAMAQATGILAFKSVGKLEPGELYYFAGIDEARFKRPVVPGDQMIMEVTFEKTRRGLTRFKGVALVDGKVVCEATMMCARSREA

SEQ ID NO: 104 - protein, 561 aa, E. coli K-12 MG1656
MKKVWLNRYPADVPTEINPDRYQSLVDMFEQSVARYADQPAFVNMGEVMTFRKLEERSRAFAAYLQQGLGLKKGDRVALMMPNLLQYPVALFGILRAGMIVVNVNPLYTPRELEHQLNDSGASAIVIVSNFAHTLEKVVDKTAVQHVILTRMGDQLSTAKGTVVNFVVKYIKRLVPKYHLPDAISFRSALHNGYRMQYVKPELVPEDLAFLQYTGGTTGVAKGAMLTHRNMLANLEQVNATYGPLLHPGKELVVTALPLYHIFALTINCLLFIELGGQNLLITNPRDIPGLVKELAKYPFTAITGVNTLFNALLNNKEFQQLDFSSLHLSAGGGMPVQQVVAERWVKLTGQYLLEGYGLTECAPLVSVNPYDIDYHSGSIGLPVPSTEAKLVDDDDNEVPPGQPGELCVKGPQVMLGYWQRPDATDEIIKNGWLHTGDIAVMDEEGFLRIVDRKKDMILVSGFNVYPNEIEDVVMQHPGVQEVAAVGVPSGSSGEAVKIFVVKKDPSLTEESLVTFCRRQLTGYKVPKLVEFRDELPKSNVGKILRRELRDEARGKVDNKA

SEQ ID NO: 105 - protein, 814 aa, E. coli [sequence omitted]

SEQ ID NO: 106 - protein, 729 aa, E. coli
MLYKGDTLYLDWLEDGIAELVFDAPGSVNKLDTATVASLGEAIGVLEQQSDLKGLLLRSNKAAFIVGADITEFLSLFLVPEEQLSQWLHFANSVFNRLEDLPVPTIAAVNGYALGGGCECVLATDYRLATPDLRIGLPETKLGIMPGFGGSVRMPRMLGADSALEIIAAGKDVGADQALKIGLVDGVVKAEKLVEGAKAVLRQAINGDLDWKAKRQPKLEPLKLSKIEATMSFTIAKGMVAQTAGKHYPAPITAVKTIEAAARFGREEALNLENKSFVPLAHTNEARALVGIFLNDQYVKGKAKKLTKDVETPKQAAVLGAGIMGGGIAYQSAWKGVPVVMKDINDKSLTLGMTEAAKLLNKQLERGKIDGLKLAGVISTIHPTLDYAGFDRVDIVVEAVVENPKVKKAVLAETEQKVRQDTVLASNTSTIPISELANALERPENFCGMHFFNPVHRMPLVEIIRGEKSSDETIAKVVAWASKMGKTPIVVNDCPGFFVNRVLFPYFAGFSQLLRDGADFRKIDKVMEKQFGWPMGPAYLLDVVGIDTAHHAQAVMAAGFPQRMQKDYRDAIDALFDANRFGQKNGLGFWRYKEDSKGKPKKEEDAAVEDLLAEVSQPKRDFSEEEIIARMMIPMVNEVVRCLEEGIIATPAEADMALVYGLGFPPFHGGAFRWLDTLGSAKYLDMAQQYQHLGPLYEVPEGLRNKARHNEPYYPPVEPARPVGDLKTA

SEQ ID NO: 107 - protein, 286 aa, E. coli
MSQALKNLLTLLNLEKIEEGLFRGQSEDLGLRQVFGGQVVGQALYAAKETVPEERLVHSFHSYFLRPGDSKKPIIYDVETLRDGNSFSARRVAAIQNGKPIFYMTASFQAPEAGFEHQKTMPSAPAPDGLPSETQIAQSLAHLLPPVLKDKFICDRPLEVRPVEFHNPLKGHVAEPHRQVWIRANGSVPDDLRVHQYLLGYASDLNFLPVALQPHGIGFLEPGIQIATIDHSMWFHRPFNLNEWLLYSVESTSASSARGFVRGEFYTQDGVLVASTVQEGVMRNHN

SEQ ID NO: 108 - protein, 132 aa, E. coli
MSTTHNVPQGDLVLRTLAMPADTNANGDIFGGWLMSQMDIGGAILAKEIAHGRVVTVRVEGMTFLRPVAVGDVVCCYARCVQKGTTSVSINIEVWVKKVASEPIGQRYKATEALFKYVAVDPEGKPRALPVE

SEQ ID NO: 109 - protein, 134 aa, E. coli
MNTTLFRWPVRVYYEDTDAGGVVYHASYVAFYERARTEMLRHHHFSQQALMAERVAFVVRKMTVEYYAPARLDDMLEIQTEITSMRGTSLVFTQRIVNAENTLLNEAEVLVVCVDPLKMKPRALPKSIVAEFKQ

SEQ ID NO: 110 - protein, 266 aa, Methanothermobacter thermautotrophicus
MIILKLGGSVITRKDSEEPAIDRDNLERIASEIGNASPSSLMIVHGAGSFGHPFAGEYRIGSEIENEEDLRRRRFGFALTQNWVKKLNSHVCDALLAEGIPAVSMQPSAFIRAHAGRISHADISLIRSYLEEGMVPVVYGDVVLDSDRRLKFSVISGDQLINHFSLRLMPERVILGTDVDGVYTRNPKKHPDARLLDVIGSLDDLESLDGTLNTDVTGGMVGKIRELLLLAEKGVESEIINAAVPGNIERALLGEEVRGTRITGKH

SEQ ID NO: 111 - protein, 299 aa, E. coli
MDFPQQLEACVKQANQALSRFIAPLPFQNTPVVETMQYGALLGGKRLRPFLVYATGHMFGVSTNTLDAPAAAVECIHAYSLIHDDLPAMDDDDLRRGLPTCHVKFGEANAILAGDALQTLAFSILSDADMPEVSDRDRISMISELASASGIAGMCGGQALDLDAEGKHVPLDALERIHRHKTGALIRAAVRLGALSAGDKGRRALPVLDKYAESIGLAFQVQDDILDVVGDTATLGKRQGADQQLGKSTYPALLGLEQARKKARDLIDDARQSLKQLAEQSLDTSALEALADYIIQRNK

SEQ ID NO: 112 - protein, 371 aa, E. coli
MKDVSLSSFDAHDLDLDKFPEVVRDRLTQFLDAQELTIADIGAPVTDAVAHLRSFVLNGGKRIRPLYAWAGFLAAQGHKNSSEKLESVLDAAASLEFIQACALIHDDIIDSSDTRRGAPTVHRAVEADHRANNFEGDPEHFGVSVSILAGDMALVWAEDMLQDSGLSAEALARTRDAWRGMRTEVIGGQLLDIYLESHANESVELADSVNRFKTAAYTIARPLHLGASIAGGSPQLIDALLHYGHDIGIAFQLRDDLLGVFGDPAITGKPAGDDIREGKRTVLLALALQRADKQSPEAATAIRAGVGKVTSPEDIAVITEHIRATGAEEEVEQRISQLTESGLAHLDDVDIPDEVRAQLRALAIRSTERRM

SEQ ID NO: 113 - protein, 377 aa, E. coli K-12 MG1656
MSNPILSWRRVRALCVKETRQIVRDPSSWLIAVVIPLLLLFIFGYGINLDSSKLRVGILLEQRSEAALDFTHTMTGSPYIDATISDNRQELIAKMQAGKIRGLVVIPVDFAEQMERANATAPIQVITDGSEPNTANFVQGYVEGIWQIWQMQRAEDNGQTFEPLIDVQTRYWFNPAAISQHFIIPGAVTIIMTVIGAILTSLVVAREWERGTMEALLSTEITRTELLLCKLIPYYFLGMLAMLLCMLVSVFILGVPYRGSLLILFFISSLFLLSTLGMGLLISTITRNQFNAAQVALNAAFLPSIMLSGFIFQIDSMPAVIRAVTYIIPARYFVSTLQSLFLAGNIPVVLVVNVLFLIASAVMFIGLTWLKTKRRLD

SEQ ID NO: 114 - protein, 578 aa, E. coli K-12 MG1656
MNDAVITLNGLEKRFPGMDKPAVAPLDCTIHAGYVTGLVGPDGAGKTTLMRMLAGLLKPDSGSATVIGFDPIKNDGALHAVLGYMPQKFGLYEDLTVMENLNLYADLRSVTGEARKQTFARLLEFTSLGPFTGRLAGKLSGGMKQKLGLACTLVGEPKVLLLDEPGVGVDPISRRELWQMVHELAGEGMLILWSTSYLDEAEQCRDVLLMNEGELLYQGEPKALTQTMAGRSFLMTSPHEGNRKLLQRALKLPQVSDGMIQGKSVRLILKKEATPDDIRHADGMPEININETTPRFEDAFIDLLGGAGTSESPLGAILHTVEGTPGETVIEAKELTKKFGDFAATDHVNFAVKRGEIFGLLGPNGAGKSTTFKMMCGLLVPTSGQALVLGMDLKESSGKARQHLGYMAQKFSLYGNLTVEQNLRFFSGVYGLRGRAQNEKISRMSEAFGLKSIASHATDELPLGFKQRLALACSLMHEPDILFLDEPTSGVDPLTRREFWLHINSMVEKGVTVMVTTHFMDEAEYCDRIGLVYRGKLIASGTPDDLKAQSANDEQPDPTMEQAFIQLIHDWDKEHSNE

SEQ ID NO: 115 - protein, 368 aa, E. coli K-12 MG1656
MFHRLWTLIRKELQSLLREPQTRAILILPVLIQVILFPFAATLEVTNATIAIYDEDNGEHSVELTQRFARASAFTHVLLLKSPQEIRPTIDTQKALLLVRFPADFSRKLDTFQTAPLQLILDGRNSNSAQIAANYLQQIVKNYQQELLEGKPKPNNSELVVRNWYNPNLDYKWFVVPSLIAMITTIGVMIVTSLSVAREREQGTLDQLLVSPLTTWQIFIGKAVPALIVATFQATIVLAIGIWAYQIPFAGSLALFYFTMVIYGLSLVGFGLLISSLCSTQQQAFIGVFVFMMPAILLSGYVSPVENMPVWLQNLTWINPIRHFTDITKQIYLKDASLDIVWNSLWPLLVITATTGSAAYAMFRRKVM

SEQ ID NO: 116 - protein, 332 aa, E. coli K-12 MG1656
MMKKPVVIGLAVVVLAAVVAGGYWWYQSRQDNGLTLYGNVDIRTVNLSFRVGGRVESLAVDEGDAIKAGQVLGELDHKPYEIALMQAKAGVSVAQAQYDLMLAGYRNEEIAQAAAAVKQAQAAYDYAQNFYNRQQGLWKSRTISANDLENARSSRDQAQATLKSAQDKLRQYRSGNREQDIAQAKASLEQAQAQLAQAELNLQDSTLIAPSDGTLLTRAVEPGTVLNEGGTVFTVSLTRPVWVRAYVDERNLDQAQPGRKVLLYTDGRPDKPYHGQIGFVSPTAEFTPKTVETPDLRTDLVYRLRIVVTDADDALRQGMPVTVQFGDEAGHE

SEQ ID NO: 117 - protein, 227 aa, E. coli K-12 MG1656
MDCAMNNPAMTIKGEQAKKQLIAAALAQFGEYGMNATTREIAAQAGQNIAAITYYFGSKEDLYLACAQWIADFIGEQFRPHAEEAERLFAQPQPDRAAIRELILRACRNMIKLLTQDDTVNLSKFISREQLSPTAAYHLVHEQVISPLHSHLTRLIAAWTGCDANDTRMILHTHALIGEILAFRLGKETILLRTGWTAFDEEKTELINQTVTCHIDLILQGLSQRSL

SEQ ID NO: 118 - protein, 20 aa, Artificial Sequence
  Consensus sequence
  misc_feature (2)..(2): X is F or Y
  misc_feature (4)..(4): X is V or L
  misc_feature (19)..(19): X is M, K, or Q
  misc_feature (20)..(20): X is V or A
GXPXMIKASEGGGGKGIRXX

SEQ ID NO: 119 - protein, 5 aa, Artificial
  BCCP domain
EVMKM

SEQ ID NO: 120 - protein, 51 aa, Artificial
  CT binding domain
  misc_feature (3)..(8): X is any amino acid
  misc_feature (13)..(14): X is any amino acid
  misc_feature (20)..(21): X is any amino acid
  misc_feature (24)..(30): X is any amino acid
  misc_feature (32)..(32): Xaa can be any naturally occurring amino acid
  misc_feature (35)..(36): X is I or V
  misc_feature (41)..(41): X is I or V
  misc_feature (44)..(44): X is A or S
GRXXXXXXNDITXXIGSFGXXEDXXXXXXXEXARXXGIRRXYLXANSGARI

SEQ ID NO: 121 - protein, 20 aa, Artificial
  Consensus sequence
  misc_feature (2)..(2): X is R or K
  misc_feature (3)..(3): X is T or G
  misc_feature (16)..(16): X is M, L, or V
  misc_feature (19)..(19): X is I or V
  misc_feature (20)..(20): X is S, A, or G
AXXVVVGRARLGGIPXGVXX

SEQ ID NO: 122 - protein, 385 aa, Cannabis sativa
MNHLRAEGPASVLAIGTANPENILLQDEFPDYYFRVTKSEHMTQLKEKFRKICDKSMIRKRNCFLNEEHLKQNPRLVEHEMQTLDARQDMLVVEVPKLGKDACAKAIKEWGQPKSKITHLIFTSASTTDMPGADYHCAKLLGLSPSVKRVMMYQLGCYGGGTVLRIAKDIAENNKGARVLAVCCDIMACLFRGPSESDLELLVGQAIFGDGAAAVIVGAEPDESVGERPIFELVSTGQTILPNSEGTIGGHIREAGLIFDLHKDVPMLISNNIEKCLIEAFTPIGISDWNSIFWITHPGGKAILDKVEEKLHLKSDKFVDSRHVLSEHGNMSSSTVLFVMDELRKRSLEEGKSTTGDGFEWGVLFGFGPGLTVERVVVRSVPIKY

SEQ ID NO: 123 - protein, 385 aa, Cannabis sativa
MNHLRAEGPASVLAIGTANPENILIQDEFPDYYFRVTKSEHMTQLKEKFRKICDKSMIRKRNCFLNEEHLKQNPRLVEHEMQTLDARQDMLVVEVPKLGKDACAKAIKEWGQPKSKITHLIFTSASTTDMPGADYHCAKLLGLSPSVKRVMMYQLGCYGGGTVLRIAKDIAENNKGARVLAVCCDIMACLFRGPSDSDLELLVGQAIFGDGAAAVIVGAEPDESVGERPIFELVSTGQTILPNSEGTIGGHIREAGLIFDLHKDVPMLISNNIEKCLIEAFTPIGISDWNSIFWITHPGGKAILDKVEEKLHLKSDKFVDSRHVLSEHGNMSSSTVLFVMDELRKRSLEEGKSTTGDGFEWGVLFGFGPGLTVERVVVRSVPIKY

SEQ ID NO: 124 - protein, 385 aa, Cannabis sativa
MNHLRAEGPASVLAIGTANPENILIQDEFPDYYFRVTKSEHMTQLKEKFRKICDKSMIRKRNIFLNEEHLKQNPKLVEHDVQTLDARQDMLVVEVPKLGKDACAKAIKEWGQPKSKITHLIFTSASTTDMPGADYHCAKLLGLSPSVKRVMMYQLGCYGGGTVLRIAKDIAENNKGARVLAVCCDIMACLFRGPSDSDLELLVGQAIFGDGAAAVIVGAEPDESVGERPIFELVSTGQTILPNSEGTIGGHIREAGLIFDLHKDVPMLISNNIEKCLIEAFTPIGISDWNSIFWITHPGGKAILDKVEEKLHLKSDKFVDSRHVLSEHGNMSSSTVLFVMDELRKRSLEEGKSTTGDGFEWGVLFGFGPGLTVERVVVRSVPIKY

SEQ ID NO: 125 - protein, 385 aa, Cannabis sativa
MNHLRAEGPASVLAIGTANPENILIQDEFPDYYFRVTKSEHMTQLKEKFRKICDKSMIRKRNCFLNEEHLKQNPRLVEHEMQTLDARQDMLVVEVPKLGKDACAKAIKEWGQPKSKITHLIFTSASTTDMPGADYHCAKLLGLSPSVKRVMMYQLGCYGGGTVLRIAKDIAENNKGARVLAVCCDMTACLFRGPSDSNLELLVGQAIFGDGAAAVIVGAEPDESVGERPIFELVSTGQTFLPNSEGTIGGHIREAGLMFDLHKDVPMLISNNIEKCLIEAFTPIGISDWNSIFWITHPGGKAILDKVEEKLHLKSDKFVDSRHVLSEHGNMSSSTVLFVMDELRKRSLEEGKSTTGDGFEWGVLFGFGPGLTVERVVLRSVPINY

SEQ ID NO: 126 - protein, 385 aa, Cannabis sativa
MNHLRAEGPASVLAIGTANPENILIQDEFPDYYFRVTKSEHMTQLKEKFRKICDKSMIRKRNCFLNEEHLKQNPRLVEHEMQTLDARQDMLVVEVPKLGKDACAKAIKEWGQPKSKITHLIFTSASTTDMPGADYHCAKLLGLSPSVKRVMMYQLGCYGGGTVLRIAKDIAENNKGARVLAVCCDIMACLFRGPSDSDLELLVGQAIFGDGAAAVIVGAEPDESVGERPIFELVSTGQTILPNSEGTIGGHIREAGLIFDLHKDVPMLISNNIEKCLIEAFTPIGISDWNSIFWITHPGGKAILDKVEEKLDLKKEKFVDSRHVLSEHGNMSSSTVLFVMDELRKRSLEEGKSTTGDGFEWGVLFGFGPGLTVERVVVRSVPIKY

SEQ ID NO: 127 - protein, 385 aa, Cannabis sativa
MNHLRAEGPASVLAIGTANPENILIQDEFPDYYFRVTKSEHMTQLKEKFRKICDKSMIRKRNCFLNEEHLKQNPRLVEHEMQTLDARQDMLVVEVPKLGKDACAKAIKEWGQPKSKITHLIFTSASTTDMPGADYHCAKLLGLSPSVKRVMMYQLGCYGGGTVLRIAKDIAENNKGARVLAVCCDIMACLFRGPSDSDLELLVGQAIFGDGAAAVIVGAEPDESVGERPIFELVSTGQTILPNSEGTIGGHIREAGLIFDLHKDVPMLISNNIEKCLIEAFTPIGISDWNSIFWITHPGGKAILDKVEEKLHLKKEKFVDSRHVLSEHGNMSSSTVLFVMDELRKRSLEEGKSTTGDGFEWGVLFGFGPGLTVETVVLRSVPINY

SEQ ID NO: 128 - protein, 399 aa, Hydrangea macrophylla
MATKSVAVEEMCKAQKAGGPATILAIGTAVPSNCYYQSEYPDFYFRVTKSDHLTDLKSKFKRMCERSSIKKRYMHLTEEILEENPNMCTFAAPSIDGRQDIVVKEIPKLAKEAASKAIKEWGQPKSNITHLVFCTTSGVDMPGCDYQLTRLLGLRPSIKRLMMYQQGCHAGGTGLRLAKDLAENNKGARVLVVCSEMTVINFRGPSEAHMDSLVGQSLFGDGASAVIVGSDPDLSTEHPLYQIMSASQIIVADSEGAIDGHLRQEGLTFHLRKDVPSLVSDNIENTLVEAFTPILMDSIDSIIDWNSIFWIAHPGGPAILNQVQAKVGLKEEKLRVSRHILSEYGNMSSACVFFIMDEMRKRSMEEGKGTTGEGLEWGVLFGFGPGFTVETIVLHSVPI

SEQ ID NO: 129 - protein, 399 aa, Hydrangea macrophylla
MATKSVAVEEMCKAQKAGGPATILAIGTAVPSNCYYQSEYPDFYFRVTKSDHLTDLKSKFKRMCDRSSIKKRYMHLTEEILKENPNMCSFAAPSIDGRQDIVVKEIPKLAKEAASKAIKEWGQPESNITHLVFCTTSGVDMPGCDYQLTRLLGLRPSIKRLMMYQQGCHAGGTGLRLAKDLAENNKGARVLVVCSEMTVINFRGPSEAHMDSLVGQSLFGDGASAVIVGSDPDLSTEHPLYQIMSASQIIVADSEGVIDGHLRQEGLTFHLRKDVPSLVSDNIENTLVEAFTPILMDSIDSIIDWNSIFWIAHPGGPAILNQVQAKVGLKEEKLRVSRHILSEYGNMSSACVFFIMDEMRKRSVEEGKGTTGEGLEWGVLFGFGPGFTVETIVLHSVPI

SEQ ID NO: 130 - protein, 399 aa, Hydrangea macrophylla
MATKSVAVEEMCKAQKAGGPATILAIGTAVPSNCYYQSEYPDFYFRVTKSDHLTDLKSKFKRMCERSSITKRYMHLTEEILEENPNMCTFAAPSIDGRQDIVVKEIPKLAKEAASKAIKEWGQPKSNITHLVFCTTSGVDMPGCDYQLTRLLGLRPSIKRLMMYQQGCHAGGTGLRLAKDLAENNKGARVLVVCSEMTVINFRGPSEAHMDSLVGQSLFGDGASAVIVGSDPDLSTEHPLYQIMSASQIIVADSEGAIDGHLRQEGLTFHLRKDVPSLVSDNIENTLVEAFTPILMDSIDSIIDWNSIFWIAHPGGPAILNQVQAKVGLKEEKLRVSRHILSEYGNMSSACVFFIMDEMRKRSVEEGKGTTGEGLEWGVLFGFGPGFTVETIVLHSVPI

SEQ ID NO: 131 - protein, 392 aa, Marchantia polymorpha
MSRSRLIAQAVGPATVLAMGKAVPANVFEQATYPDFFFNITNSNDKPALKAKFQRICDKSGIKKRHFYLDQKILESNPAMCTYMETSLNCRQEIAVAQVPKLAKEASMNAIKEWGRPKSEITHIVMATTSGVNMPGAELATAKLLGLRPNVRRVMMYQQGCFAGATVLRVAKDLAENNAGARVLAICSEVTAVTFRAPSETHIDGLVGSALFGDGAAAVIVGSDPRPGIERPIYEMHWAGEMVLPESDGAIDGHLTEAGLVFHLLKDVPGLITKNIGGFLKDTKNLVGASSWNELFWAVHPGGPAILDQVEAKLELEKGKFQASRDILSDYGNMSSASVLFVLDRVRERSLESNKSTFGEGSEWGFLIGFGPGLTVETLLLRALPLQQAERV

SEQ ID NO: 132 - protein, 305 aa, Streptomyces antibioticus
MSGAADVERVYAAMEEAAGLLGVTCAREKIYPLLTEFQDTLTDGVVVFSMASGRRSTELDFSISVPTSQGDPYATVVDKGLFPATGHPVDDLLADTQKHLPVSMFAIDGEVTGGFKKTYAFFPTDDMPGVAQLSAIPSMPSSVAENAELFARYGLDKVQMTSMDYKKRQVNLYFSELSEQTLAPESVLALVRELGLHVPTELGLEFCKRSFSVYPTLNWDTGKIDRLCFAVISTDPTLVPSTDERDIEQFRHYGTKAPYAYVGENRTLVYGLTLSPTEEYYKLGAYYHITDIQRRLLKAFDALED

SEQ ID NO: 133 - protein, 305 aa, Streptomyces Sp. Strain Cl190
MSGAADVERVYAAMEEAAGLLDVSCAREKIYPLLTVFQDTLTDGVVVFSMASGRRSTELDFSISVPVSQGDPYATVVREGLFRATGSPVDELLADTVKHLPVSMFAIDGEVTGGFKKTYAFFPTDDMPGVAQLTGIPSMPASVAENAELFARYGLDKVQMTSMDYKKRQVNLYFSDLKQEYLQPEAVVALARELGLQVPGELGLEFCKRSFAVYPTLNWDTGKIDRLCFAAISTDPTLVPSTDERDIEMFREYATKAPYAYVGEKRTLVYGLTLSPTEEYYKLGAYYHITDIQRQLLKAFDALED

SEQ ID NO: 134 - protein, 305 aa, Actinobacteria bacterium OV320; identical to SEQ ID NO: 133

SEQ ID NO: 135 - protein, 305 aa, Streptomyces tendae
MSGAADVERVYAAMEEAAGLLDVSCAREKIYPLLTVFQDTLTDGVVVFSMASGRRSTELDFSISVPVSQGDPYATVVKEGLFRATGSPVDELLADTVKHLPVSMFAIDGEVTGGFKKTYAFFPTDDMPGVAQLTEIPSMPASVAENAELFARYGLDKVQMTSMDYKKRQVNLYFSDLKQEYLQPEAVVALARELGLQVPGELGLEFCKRSFAVYPTLNWDTGKIDRLCFAAISTDPTLVPSTDERDIEMFREYATKAPYAYVGEKRTLVYGLTLSSTEEYYKLGAYYHITDIQRQLLKAFDALED

SEQ ID NO: 136 - protein, 305 aa, Streptomyces sp. Root1310
MSGAADVERVYAAMEEAAGLLDVSCAREKIYPLLTVFQDTLTDGVVVFSMASGRRSTELDFSISVPVSQGDPYATVVKEGLFQATGSPVDELLADTVAHLPVSMFAIDGEVTGGFKKTYAFFPTDDMPGVAQLAAIPSMPASVAENAELFARYGLDKVQMTSMDYKKRQVNLYFSDLKQEYLQPESVVALARELGLRVPGELGLEFCKRSFAVYPTLNWDTGKIDRLCFAAISTDPTLVPSEDERDIEMFRNYATKAPYAYVGEKRTLVYGLTLSSTEEYYKLGAYYHITDIQRQLLKAFDALED

SEQ ID NO: 137 - protein, 305 aa, Streptomyces paucisporeus
MSGAAEVERVYSAMEEAAGLLDVACSPEKVRPILTAFQDVLSDGVIVYSMASGRHATELDFSISVPADHGDPYTAALAHGLIPETDHPVGNLLADTQKALPVSMFAVDGEVTGGFKKTYAFFPTDDMPGLAQLIDIPSMPPSVAENAELFARYGLDKVQMTSLDYKRKQVNLYFSNLQPEFLAPEPVLSMVREMGLELPGEKGLKFARRSFAIYPTLGWESGKIERLCFAVISTDPGLVPAPDEADRALFSTYANNAPYAYAGEKRTLVYGLTLSPTEEYYKLGSYYQITDIQRTLLKAFDALTD

SEQ ID NO: 138 - protein, 305 aa, Streptomyces sp. URHA0041
MSGAAEVERVYSAMEESAGLLDVACSREKIQPILTAFQDVLADGVIVFSMANGRHATELDFSISVPAGHGDPYAAALEHGLIPATGHPVGDLLADTQKALPVSMFAVDGEVTSGFKKTYAFFPTDDMPGLAQLIDIPSMPPSVAENAELFGRYGLDKVQMISLDYKKNQVNLYFSNLNPEFLQPEPVQAMVREMGLQLPADKGLAFAKRSFAVYPTLSWDSAKIERLCFAVISTDPTLAPAQEQADLDLFSTYANNAPYAYAGEKRTLVYGLTLSPSEEYYKLGSYYQISDIQRKLLKAFDALTD

SEQ ID NO: 139 - protein, 305 aa, Streptomyces sp. CNQ-509
MSGAADVERVYSAMEEAARLLDITVSREKVRPALEAYHEVLADAVVVFSMASGRYATELDFSISVPAEAGDPYRVALAKGLTPRTDHPVGRLLADTQEHCPVSMFAFDGEITGGFKKTYAFFPTNDLQSASKLAEIPSMPDSVKENADLFARYGLDKVQMTSIDYKKKAVNLYFSEMSPDILGPDTVRSMLRDMGLKETGETGLTFARRSFSVYPTLNWETGRIERLCFAVISRDPTLAPAERAEDLAKFSKYANNAPYAYAGEARTLVYGLTLTPREEYYKLGSYYQISDIQRKLLKAFDSLND

SEQ ID NO: 140 - protein, 304 aa, Streptomyces
MSGAKDVERVYSAMEEAAGLLNVPVARDKIWPVLTAYQDALADAVIVFSMAGGRRSTELDFSISVPTDHGDPFTTALERGLTEKENHPVDNLLAELRDGFPLGMYAIDGMVTTGFKKAYASFPTNEPQPLTALLDLPSMPESARANAELFARYGLDKVQMVSVDYPKRQVNLYFSELKADHLTPEQVKATASEMGLVEPTDMALDFATGSFAVYPTLGYDSDVVDRITYAVISVDPTLAPTTSEPEKTQITTYANSAPYAYAGENRTLVYGFTLTSKEEYYKLGSYYQITDLQRTLVKAFEALD

SEQ ID NO: 141 - protein, 304 aa, Streptomyces sp. CNH099
MSGAKDVERVYSAMEEAAGLLNVPVARDKIWPVLTAYQDALADAVIVFSMAGGRRSTELDFSISVPTDHGDPFTTALERGLTEKENHPVDNLLAELRDGFPLGMYAIDGMVTTGFKKAYASFPTNEPQPLTALLDLPSMPESARANAELFARYGLDKVQMVSVDYPKRQVNLYFSDLNADHLTPEEVKSTASEMGLVEPTDMALDFATGSFAVYPTLGYDSDVVDRITYAVISVDPTLAPTTSEPEKTQITTYANSAPYAYAGENRTLVYGFTLTSKEEYYKLGSYYQITDLQRTLVKAFEALD

SEQ ID NO: 142 - protein, 304 aa, Streptomyces
MSGANDVERVYSAMEEAAGLLNVPVARDKIWPVLTAYQDALADAVVVFSMAGGRRATELDFSISVPTDLGDPFTTALRRGLTEKTNHPVDNLLAELTDGFEIGMYAIDGMVTTGFKKTYASFPTNEPQPLTALLDVPSMPESARANAELFARYGLDKVQMVSVDYPKRQVNLYFSELDTDYLQPEHVKSLARETGLVEPTEMGLDFASGSFAVYPTLGYDNDIVDRITYAVISVDPTLAPTKSEPEVSQLSRYATSAPYAYAGENRTLVYGVTLTSKEEYYKLGSYYQITDLQRTLVKAFEALD

SEQ ID NO: 143 - protein, 304 aa, Streptomyces
MSGANDVERVYSAMEEAAGLLGVPVAREKVRPVLTAYQDALADAVVVFSMAGGRRATELDFSISVPTDHGDPFTTALQRGLTEKTGHPVDNLLAELREGFPLGMYAIDGMVSTGFKKTYASFPTNEPQPLDDLLDVPSMPASARANAKLFANYGLDKVQMVSVDYPKRQVNLYFSELNTDYLQPAQVKALAAEMGLIEPSELGLEFAKGSFAVYPTLSYDTDASDRLCLAVISSDPTLAPTTSEPEVTQFSTYANNAPYAYAGENRTLVYGLTLTPKEEYYKLGSYYQITDYQRKLVKAFEALD

SEQ ID NO: 144 - protein, 306 aa, Streptomyces sp. 303MFCol5.2
MSKATEVDRVYAAVEKAAALAGTTCAGDKVRPVLTGHQDLLDEAVIVFSMTASGSHSGGLDLSMTVPAEHVDPYSFALSEGLIEPTDHPVGSVISDFQERFPIGMYGIDVDVAGGFKKAYAAFPSNDLRELKQLFDLPSMPSAAAENAELFARYGLDRVTGVSVDYKRHELNLYCDRATTEPLDPDYVQSMLRDMGLKEASEQGLEFAKKTFAIYPTLNWDSSEIVRICFAVITTDPATTPTRSEPELGQMWEYANTAPYAYVGEQRALVYGLALSPEKEYYKLGAYYQISDYQRKLVKAFDALPE

SEQ ID NO: 145 - protein, 378 aa, Streptomyces niveus
MCVPGSRARRPGSRGWLERTAKPAPTRGTVGAKVRSQTWERRAPGATTVTCPVQGRSTGPIQADIQDRHVGDSMSGAADVERVYSAMERAAGLLDLTCAREKILPILTAYKEALADSVIVFSMSGGDHSAELDFSFTIPSGDVDPYAFGPSTGIPTETDHPIASLLSDTGERCPVAMYGVDGEVSGGFKKTYAAFPINDLLDLSKLVAVPSMPPAVAENAELFARYGLDKVQGISIDYQRKQVNLYCGDIPAESLEPETVRSMLREMGLREPSEEGLEFVRKSFAVYPTLSWDSSRIERICFAVISTDPTLAPTRVESDVALFSKYANNAPYAYAGERRTLIYGLAVSPTKEYIKLGSYYQISDHQRKLVKAFDALED

SEQ ID NO: 146 - protein, 311 aa, Streptomyces sp. CNH287
MYGGTEVEEVYSALEKSAGLVGVPCNRDKVWPALSTYQDALGEAVIVFSVATDERHAGELDYTITVPTGGADPYALALAKGLTPETDHPVGTLLAGVQERCPVAGYAVDCGVVGGFKKIYSFFPQDDLQGLAKLAEIPSMPRALAENAALFARHGLDHKVTMLGIDYQRESVNLYFGKLPEECLQPDSIRAILRDIGLPEPTEPMLEFARKSFAIYVTLSWDAAKVERICFAVPPGRDLITLDPSALPARIAPEIEHFARNSPYAYPGDRMLVYGVTWSPEEEYYKLGSYYQLPVQTRKLLVAFDSVKDQE

SEQ ID NO: 147 - protein, 177 aa, E. coli K-12 MG1656
MRLLPLVAAATAAFLVVACSSPTPPRGVTVVNNFDAKRYLGTWYEIARFDHRFERGLEKVTATYSLRDDGGLNVINKGYNPDRGMWQQSEGKAYFTGAPTRAALKVSFFGPFYGGYNVIALDREYRHALVCGPDRDYLWILSRTPTISDEVKQEMLAVATREGFDVSKFIWVQQPGS

SEQ ID NO: 148 - protein, 403 aa, E. coli K-12 MG1656
MQPGKRFLVWLAGLSVLGFLATDMYLPAFAAIQADLQTPASAVSASLSLFLAGFAAAQLLWGPLSDRYGRKPVLLIGLTIFALGSLGMLWVENAATLLVLRFVQAVGVCAAAVIWQALVTDYYPSQKVNRIFAAIMPLVGLSPALAPLLGSWLLVHFSWQAIFATLFAITVVLILPIFWLKPTTKARNNSQDGLTFTDLLRSKTYRGNVLIYAACSASFFAWLTGSPFILSEMGYSPAVIGLSYVPQTIAFLIGGYGCRAALQKWQGKQLLPWLLVLFAVSVIATWAAGFISHVSLVEILIPFCVMAIANGAIYPIVVAQALRPFPHATGRAAALQNTLQLGLCFLASLVVSWLISISTPLLTTTSVMLSTVVLVALGYMMQRCEEVGCQNHGNAEVAHSESH

SEQ ID NO: 149 - protein, 183 aa, E. coli K-12 MG1656
MQTKKNEIWVGIFLLAALLAALFVCLKAANVTSIRTEPTYTLYATFDNIGGLKARSPVSIGGVVVGRVADITLDPKTYLPRVTLEIEQRYNHIPDTSSLSIRTSGLLGEQYLALNVGFEDPELGTAILKDGDTIQDTKSAMVLEDLIGQFLYGSKGDDNKNSGDAPAAAPGNNETTEPVGTTK

SEQ ID NO: 150 - protein, 260 aa, E. coli K-12 MG1656
MLLNALASLGHKGIKTLRTFGRAGLMLFNALVGKPEFRKHAPLLVRQLYNVGVLSMLIIVVSGVFIGMVLGLQGYLVLTTYSAETSLGMLVALSLLRELGPVVAALLFAGRAGSALTAEIGLMRATEQLSSMEMMAVDPLRRVISPRFWAGVISLPLLTVIFVAVGIWGGSLVGVSWKGIDSGFFWSAMQNAVDWRMDLVNCLIKSVVFAITVTWISLFNGYDAIPTSAGISRATTRTVVHSSLAVLGLDFVLTALMFGN

SEQ ID NO: 151 - protein, 269 aa, E. coli K-12 MG1656
MEQSVANLVDMRDVSFTRGNRCIFDNISLTVPRGKITAIMGPSGIGKTTLLRLIGGQIAPDHGEILFDGENIPAMSRSRLYTVRKRMSMLFQSGALFTDMNVFDNVAYPLREHTQLPAPLLHSTVMMKLEAVGLRGAAKLMPSELSGGMARRAALARAIALEPDLIMFDEPFVGQDPITMGVLVKLISELNSALGVTCVVVSHDVPEVLSIADHAWILADKKIVAHGSAQALQANPDPRVRQFLDGIADGPVPFRYPAGDYHADLLPGS

SEQ ID NO: 152 - protein, 371 aa, Corynebacterium crudilactis
MKDVSLSTFDAHDLDLNKFPEVVRDRLTRFLDAKTSTIADIGDPVTEAVSHLRNFVLNGGKRIRPLYAWAGFLAAQGRENSSEELDAVLDAASSLEFIQACALIHDDIIDSSDTRRGAPTVHRAVEADHRANNFEGAPEHFGVSVAILAGDMALVWAEDMLQDSGLSAEALARTRDAWRGMRTEVIGGQLLDIYLESHANESVELADSVNRFKTAAYTIARPLHLGASIAGGSPELIDALLHYGHDIGIAFQLRDDLLGVFGDPQITGKPAGDDIREGKRTVLLALALQRADKESPEAAEVIRAGIGKVTTPEDIARIASHIRDTGAEEEVEQRISQLTSSGLAHLDNVDIPDAVRIQLRALAIRSTERRM

SEQ ID NO: 153 - protein, 371 aa, Corynebacterium glutamicum
MKDVSLSTFDAHDLDLDTFPEVVRDRLTQFLDAQATTIAGIGDPVTEAVSHLRSFVLNGGKRIRPLYAWAGFLAAQGLENSGEKIEAVLDAASSLEFIQACALIHDDFIDSSDTRRGAPTVHRAVEANHRAHNLEGDSEHFGESVSILAGDMALVWAEDMLQDSGLSAEALARTRDAWRGMRTEVIGGQLLDIYLEAHANEAVELADSVNRFKTAAYTIARPLHLGASIAGGSQELIDALLHYGHDIGIAFQLRDDLLGVFGDPKVTGKPAGDDIREGKRTVLLALALQRADKNSPEAAAAIRAGIGKVSTPEDIAVIAKHIRATGAEEEVEQRITQLTESGLAHLDDVEIPDEVRTQLRALAIRSTERRM

SEQ ID NO: 154 - protein, 366 aa, Corynebacterium deserti
MSTFDAHDLDLDKIPDVVRDRLVAFLDAKSSTIAEIGEPVTDAVSHLRSFVLNGGKRIRPLYVWAGFLAAQGESTSEEKVEAVLDAAASLEFIQACALIHDDIIDSSDTRRGAPTVHRAVEADHRDRRFEGDPKHFGVSVSILAGDMALVWAEDMLQDSGLTAEALARTRNAWRGMRTEVIGGQLLDIYLESHANESVELADSVNRFKTAAYTIERPLHLGAAIGGGSKELIDALRRYGHDIGIAFQLRDDLLGVFGDPAITGKPAGDDIREGKRTVLLALALQRADETNPEAAAAIRAGIGKVTTPEDIATIAQLIRDTGAEEEVERRISELTASGLSYLDRVELPEEIRAQLRALAIRSTERRM

SEQ ID NO: 155 - protein, 366 aa, Corynebacterium callunae
MSTLDAHDLDLNRIPTVVHDRLSKFLDSKEGDIAAIGTPVSEAVAYLRAFVLNGGKRIRPLYTWAGFVAAGGLENNTEKLEAVLDAAASLEFIQACALIHDDIIDSSDTRRGAPTVHRAVESYHRENNLEGNSAHFGESVSILAGDMALVWAEDMLQDSGLSTEALARSRAAWRGMRTEVIGGQLLDIYLEAQANESVELANSVNRFKTAAYTIERPLHLGASIAGASPELISALRNYGHDIGIAFQLRDDLLGVFGDPAITGKPAGDDIREGKRTVLLAKALEKADKESPVAAAEIRAGIGQVSEPADIAQLAQLIRDTGAEAEVENLITDLTTSGLAHLEAVSMPAEVKELLRSLAIRSTERRM

SEQ ID NO: 156 - protein, 366 aa, Corynebacterium efficiens
MSTAHDHNVDLDQIPDVVRERLTRFLDDRAANVVAIGGPVTEALSYLRDFVLNGGKRIRPLYVWAGFVAAQGPGRSSEDINAVLDAAASLEFIQACALIHDDIIDSSDTRRGAPTVHRAVESMHGAVGLEGDAAHFGESVAILAGDMALVWAEDMLQDSGLSAAALARARDAWRGMRTEVIGGQLLDIYLEAQASESVELANSVNRFKTAAYTIERPLHLGASLAGGAPELIDALRNYGRDIGIAFQLRDDLLGVFGDPAVTGKPAGDDIREGKRTVLLALALQRADAEDPEAAAAIRSAIGKVTDPAEITRIAGLIRATGAEDEVEEHISRLTASGLAHLEIAGIPDEVREQLRHLAIRATERRM

SEQ ID NO: 157 - protein, 366 aa, Corynebacterium sp. Marseille-P2417
MSSFDAHDLTLDRIPGVVAGRLTRYLDSRAGDIAVIGAPVSAAVEHLRSFVLGGGKRIRPLYAWAGFLAAQGPQRAEERLESVLDAASSLEFIQACALLHDDIIDSSDTRRGRPTVHRAVETQHGSQGLQGDSAHFGESVSILVGDMALVWSEDMFQDSGLSAPALARAREPWRAMRTEVIGGQLLDISLEATTNESVELADAVNRFKTAAYTIERPLHLGAAIAGADAGLITALRGYGRDIGVAFQLRDDLLGVFGDPVVTGKPAGDDLREGKRTVLLALALKLADAHNPDSATAIREGVGRVSTPADIAELAGIIRETGAEREVEERITRLTRSGLAQLEDVGLPADVREHLEHLAIRSTERRM

SEQ ID NO: 158 - protein, 367 aa, Corynebacterium humireducens
MSTPSPLTTLTLDQVPDAVREELTRFIDDRRRQVAAIGGPVTEAVAHLESFVLGGGKRIRPLYAWAGFVGGGGLERAAEDPAAMLRAAASLEFIQACALIHDDIIDSSDTRRGNLTVHRAVEKQHRDRAWAGDPAHFGESVAILVGDLALVWAEDMLQDSGLSVAALQRARDPWRGMRTEVIGGQLLDITLEATADENIELADSVNRFKTAAYTIERPLHLGAAIAGADQATIDAFRGYGHDIGIAFQLRDDQLGVYGDPAVTGKPAGDDLREGKRTVLLATALQRADDRDPAAAAELRAGVGATDDPAQIARLAQIIADTGAVEEIEERITELTRSGLAHLAAAGTSPEVTATLTDLAHRATARRH

SEQ ID NO: 159 - protein, 366 aa, Corynebacterium halotolerans
MTSTDPRTLTLERVPGAARDALSEFFDARRGQIAGIGAPVTDAVAHLESFVLGGGKRIRPLYAWAGFVGAGGFDRTGEEPAAVLKAAASLEFIQACALVHDDIIDSSDTRRGNPTVHRAVEKRHADNGWLGDAAHFGESVAILVGDLALVWAEDMLQDSGLSVDALRRAREPWRAMRTEVIGGQLLDISLEAAADERVELAESVNRFKTAAYTIERPLHLGAALAGADDALIEAFRGYGRDIGMAFQLRDDQLGVYGDPAVTGKPAGDDLREGKRTVLLALALRRADERDPAAAAELRRGVGATGDPATLARLAEIIRSTGAVEEVEERISALTTSGLAHLDAAGTAPEVTETLRALAVRVTERRM

SEQ ID NO: 160 - protein, 366 aa, Corynebacterium marinum
MSSQDLRTLTLDQIPDAARDELSRFFADRRPQVAAIGGPVTDAVAHLEKFVLGGGKRIRPLYVWAGFAGGGGFDATSEDPAAVLRAAASLEFIQACALIHDDIIDASDTRRGNPTVHRAVEEAHRTSGWSGDPAHFGESVAILVGDLALVWAEDMFQDSGLSVEALQRAREAWRAMRTEVIGGQLLDISLEATADEDVELADSVNRFKTAAYTIERPLHLGASIAGADDKTIEAFRGYGRDIGIAFQLRDDQLGVYGDPAVTGKPAGDDLREGKRTVLLATALKRADDRDPAAAAELRAGVGAVADPGEVSRLADIIAGTGAVEEIEERITALTASGLAHLSAAHTSPEVTATLTDLAHRATARRH

SEQ ID NO: 161 - protein, 363 aa, Corynebacterium singulare
MTEPKIPSLDDIPGAVRDELAQFLAGQRSAIAAIGQPVTNAISYLESFVLDGGKRIRPLYAWAGFVGARGLEGPESPDAMLRAASSLEFIQACALIHDDIVDASDTRRGNPTVHRGVAKRHRDLGLGGDSDFFGQSLAILIGDMALVWAEDMLQDSGLSPKALARVRDPWRGMRREVIGGQMLDISLEAEGSEDASLADSVNRFKTAAYTIERPLHLGAAVAGASDQLIAAFRGYGRDIGIAFQLRDDLLGVFGDPAVTGKPAGDDLREGKRTVLLSLALQRADESDPAAAAELRRLIGQTEDPQEIARMAEIIEASGAPDVVEQRISDLTRSGLAHLHDAPVSPEVTTTLEELARKSTARRM

SEQ ID NO: 162 - protein, 363 aa, Corynebacterium minutissimum
MTEPKIPTLDDIPAAVRAELAFFLDGQRDSIAAIGQPVTHAISYLESFVLNGGKRIRPLYAWAGFVGAHGLEGSESPEAMLRAASSLEFIQACALIHDDIVDASDTRRGNPTVHRGVAARHRELELNGDADFFGQSLAILIGDMALVWAEDMLQDSGLSPEALARVREPWRGMRREVIGGQMLDISLEAEGSEDASLADSVNRFKTAAYTIERPLHLGAAVAGASEELIAAFRGYGRDIGIAFQLRDDLLGVFGDPAITGKPAGDDLREGKRTVLLSLALQRTDATDPVAAAELRRLIGQTEDPDEISRMAEIIAESGAPDVVEQRITELTQSGLSHLYDAHVSPDVTATLEDLARKSTARRM

SEQ ID NO: 163 - protein, 360 aa, Corynebacterium pollutisoli
MQTLTLDQVPAAARDELARFIDSRRAQVAAIGGPVTRAVSHLESFVLDGGKRIRPLYAWAGFVGGGGLETDEDPAAMLRAAASLEFIQGCALIHDDIIDASDTRRGNPTVHRAVEKVHGDNGWAGDPAHFGESVAILVGDLALVWAEDMLQDSGLSVAALQRAREPWRAMRTEVIGGQLLDISLEATGDEDIELADSVNRFKTAAYTIERPLHLGAAIAGADQATIDAFRGYGRDIGIAFQLRDDELGVYGDPEVTGKPAGDDLREGKRTVLLATALQRADERDPAAAAELRRGIGTTSDPAEIARLAQIIAETGAVEALEERISALTASGLAHLAAVGTSPEVTATLTDLAHRATARRR

SEQ ID NO: 164 - protein, 374 aa, Corynebacterium lubricantis
MSAPDNQAKDLRQLSLNDVPEEAQKLLAQFFNEQEEKVAGIGRPVTEAVSYLRDFVLNGGKRVRPLYGWAGFVGAGGLKNLNGTNEDPQAVLRAVSSLEFIQACALIHDDIIDSSDTRRGNPTVHRAVEAAHQEQQWTGDSAHFGESTAILVGDLALVWAEDMWRYSGLSHAALDRAAEPWRAMRTEVIGGQLLDISLEASGDESPELANAVNRFKTAAYTIERPLHLGAAIAGASPEVIEAFRGYGTDIGIAFQLRDDLLGVFGDPSETGKPAGDDLREGKRTVLLATALQRADKSDPAAAAQLRAGVGTETNPEKIAELASIIASTGAVESIEEQISTLTVSGLKHLTDAGIEPQVTEDLHKLAIRMTERRK

SEQ ID NO: 165 - protein, 371 aa, Corynebacterium spheniscorum
MDTPVSASRTAHTTPDIHQIPDAVRGVLSDFLEGRRSKVAKIGEPVTRAVSYLEDFVLGGGKRIRPLYAWAGFVGAGGLEGPEDPQAVLRAVSSLEFIQACALIHDDIIDSSATRRGNPTLHRAVASAHQEQNFAGLADHFGMSVAILVGDMALVWAEDMLRNSGVSADALARLNRPWAGMRTEVIGGQILDISLEASGDESVQLANNVNRFKTAAYTIERPLHLGAAIAGASPEVIRAFRGYGRDIGIAYQLRDDLLGVFGDPAITGKPAGDDLREGKRTVLLALALERADAHDPQAAAALRAGVGHTQDPAELARLAQIIRDTGAPDEVEARITELTTSGLAQLETAELSPTVTSVLKDLAIRSTERRS

SEQ ID NO: 166 - protein, 371 aa, Corynebacterium doosanense
MSSQSTPGPRPDPATIDSIPDAARAQLAAYIEARRPEIDAIGAPVTTALEHLADFVLGGGKRIRPLYGWAGFVGAGGLENSSEDPEAVLRAVSSLEFIQACALVHDDIIDSSETRRGRPTVHRAVAADHRDRNHLGEPDHYGLSAAILIGDLALAWADDMFADSGISAAAFARAREPWRGMRTEVIGGQLLDISLESSGSEDITLSRSVNRYKTAAYTIERPLHIGAALAGADEQLISSFRGYGHDIGIAFQLRDDLLGVFGDPALTGKPAGDDLREGKRTELLSLALADADRSDPAAAAELRAGVGTVDDPADITRLADIIASTGAPEQMEQRIEELTRSGLAHLDRVQLPESVKSTLHSLAIRSTERRT

SEQ ID NO: 167 - protein, 361 aa, Corynebacterium flavescens
MHHTPNLDEIPGAVHQELSAFVSAQRPEIEKIGAPVVNATAFLESFVLGGGKRIRPLYAWAGFVGAGGLDGDEDPEAMLRAAASLEFIQASALIHDDIIDGSDTRRGQPTVHRGVEAVHRSRQHLGDPEAFGESVAILVGDMALVWAEDMFQDSGLSFQALRRARDPWRGMRTEVIGGQLLDVSLEAAGSEDENLANSVNRFKTAAYTIERPLHLGAAIAGADEALIAAFRGYGRDIGVAFQLRDDQLGVFGDPEVTGKPAGDDLREGKRTVLLALALQRADESNPAAAAELRAKIGNVEDPADIARLAQIITDSGAPALIEQRIAALTSSGLRHLRESGVAPEVTETLEALALKATARRS

SEQ ID NO: 168 - protein, 363 aa, Corynebacterium aurimucosum
MTTPQIPSLDDIPVAVREELELFLDSQRDAIASIGSPVTNAISYLESFVLDGGKRIRPLYAWAGFIGAHGLEGTESPQAMLRAASSLEFIQACALIHDDIVDASDTRRGNPTVHRGVAARHRELGLSGDADFFGQSLAILVGDMALVWAEDMLQDSGLSPEALARARAPWRAMRREVIGGQMLDICLEAEGSEDATLADSVNRFKTAAYTIERPLHLGAAVAGAPEKLVAAFRGYGQDIGVAFQLRDDLLGVFGDPAITGKPAGDDLREGKRTVLLSLALQRADATDPAAASELRRLIGQTEDPADIARMAQIIADSGAPDVVEQRISDLTRSGLDHLHNAQVAPEVTATLEELAHKSTARRM

SEQ ID NO: 169 - protein, 366 aa, Corynebacterium ammoniagenes
MNNSEAFHQLPIAEVPKHVRAELADFLKEREPQIAQIGRPVTNAIEHLERFILGGGKRIRPLYVWAGFVAADGLLGDEDPQAVLRAASSLEFIQSCALIHDDIVDASDTRRGNPTVHRAVEAEHRKLGWTGDPEAFGRSAAILIGDMSLVWAEDMLLDSGLSQAALQRTREPWRAMRTEVIGGQLLDVSLEAAAIESVELSDSVNRFKTAAYTIERPLHLGAAIAGAPQKLIDAFRGYGRDIGIAFQLRDDQLGVFGDPKVTGKPAGDDLREGKRTVLMAIALQRADEQDPSAAQFLRDNLGATDDPSVLSKMAQMIEDSGAPEEIEQRIDALTQSGLEYLAAAQVNSEVTELLRSLAIQSTARAK

SEQ ID NO: 170 - protein, 359 aa, Corynebacterium kefirresidentii
MQNIPELADIPGAVREELATFLDQRREQVAAIGAPVTKAVSFLESFVLDGGKRVRPTYAWAGYLAAGRGEEDPEAMLRASASLEFIQACALIHDDIIDASNTRRGNPTVHRGVEKLHRESGYLGDPEFFGTSVAILVGDLALVYAEDMFQDSGLSAAALHRARNAWRGMRTEVIGGQLLDISLEAAGSESVELANSVNRYKTAAYTIERPLHLGASIAGASEELIAAFRGYGQDIGIAYQLRDDQLGVFGDPAVTGKPAGDDLREGKRTELLALALRRADESDPQAAATLRKLIGHTSDPQELSRLAQIIADSGAPEEIERRIEALTQSGLQHLRAARVDPAVTETLEQLAIKATARHK

SEQ ID NO: 171 - protein, 363 aa, Corynebacterium camporealensis
MTFPNVPSLADVPSTTQELLSEFLEARRPQVAEIGQPVTQATQFLEDFVLGGGKRIRPLYAWAGFIGADGLDGDEDPQAVLRAAASLEFIQACALIHDDIIDASDTRRGNPTVHRGVAALHWEAGYQGSPEFFGQSVAILVGDLALAWSEDMLQDSGLSAAALQRVREPWRAMRTEVIGGQLLDITLEAQGSESVELADAVNRYKTAAYTIERPLHIGAALADAPSHLIDAFRGYGRDIGIAFQLRDDQLGVFGDPSVTGKPAGDDLREGKRTVLLALALQELDEKDPSAAATLRAGVGNVSEPEELAKLSQIIEDSGAPGLIEKRIARLTESGLNHLRAADVSDEVTATLEELAHKATARRA

SEQ ID NO: 172 - protein, 359 aa, Corynebacterium tuberculostearicum
MQNIPELADIPGAVREELATFLDQRREQVAAIGAPVTKAVSFLESFVLDGGKRVRPTYAWAGYLAAGRGEEDPVAMLRAAASLEFIQACALIHDDIIDASNTRRGNPTVHRGVEKLHRESEYLGDPEFFGTSVAILVGDLALVYAEDMFQDSGLSAAALHRARSPWRGMRTEVIGGQLLDISLEAAGSESVELANSVNRYKTAAYTIERPLHLGAATAGASEELIAAFRGYGHDIGIAYQLRDDQLGVFGDPAVTGKPAGDDLREGKRTELLALALQRADESDPQAAATLRKLIGRTSDPQELSRLAQIIADSGAPEEIERRIDALTQSGLQHLRAAQVDPAVTETLEQLAIKATARRK

SEQ ID NO: 173 - protein, 359 aa, Corynebacterium pseudogenitalium
MQNIPELADIPGAVREELATFLDQRREQVAAIGAPVTKAVSFLESFVLDGGKRVRPTYAWAGYLAAGRGEEDPAAMLRAAASLEFIQACALIHDDIIDASNTRRGNPTVHRGVEKLHRESEYLGDPEFFGTSVAILVGDLALVYAEDMFQDSGLSAAALHRARSPWRGMRTEVIGGQLLDISLEAAGSESVELANSVNRYKTAAYTIERPLHLGAAIAGASEELIAAFRGYGHDIGIAYQLRDDQLGVFGDPAVTGKPAGDDLREGKRTELLALALHRADESDPQAAATLRKLIGRTSDPQELSRLAQIIADSGAPEEIERRIDALTQSGLQHLHAAQVDPAVTETLEQLAIKATARRK

SEQ ID NO: 174 - protein, 422 aa, Corynebacterium testudinoris
MRARSLFSPLPSRYRAWWKSQLRILHPANTPRLRLSRHLTGYPKGHQFLHFEGPDALNFPDPRSLTLDQIPGATQDVLVEFLRSREQQISAIGQPVTEAVSHLEAFVVGGGKRIRPLYAWAGFVGGGGLTNGKEDPYAMLKAAASLEFIQACALIHDDIIDASDTRRGQPTVHRAVEARHSSAQWVKESAHFGESVAILVGDLALVWAEDMLQDSGLSDDAKARARDPWRAMRTEVIGGQLLDIYLEASGSESIEAADAVNRYKTAAYTIERPLHLGAAVAGADEATIAAFRGYGRDIGIAYQLRDDYLGVFGDPGVTGKPAGDDLREGKRTVLLATALQLADEHDPSAAAELRTKIGTTTDLAEVARLTEIIASTGAVEAMEKRIDALTASGLAYLDAAGTSPEVTDTLRDLAIRSTFRRS

SEQ ID NO: 175 - protein, 366 aa, Corynebacterium stationis
MNNSEDFSQLPIAEIPKHVRAELSSFLKAREPQLAQIGKPVTEAIEHLERFVLDGGKRIRPLYAWAGFVAADGLLGSEEPQAVLRAASSLEFIQSCALIHDDIVDASDTRRGNPTVHRAVEAQHRALGWTGDSADFGRSAAILIGDMSLVWAEDMFLDSGISQAAIQRAREPWRAMRTEVIGGQLLDVSLEAAAIESVELSDSVNRFKTAAYTIERPLHLGAAIAGASDKLIDAFRGYGRDIGIAFQLRDDQLGVFGDPQVTGKPAGDDLREGKRTVLMAIALQRADEQDPPTAKFLRENLGATDDPSVLSKMSQMIEDSGASEEIEQRIDALTQSGLEYLAAANVNSEVTELLRSLAIKSTARAK

SEQ ID NO: 176 - protein, 366 aa, Corynebacterium sp. J010B-136
MNNSEDFSQLPIAEIPKHVRAELSSFLKAREPQLAQIGKPVTEAIEHLERFVLDGGKRIRPLYAWAGFVAADGLLGSEDPQAVLRAASSLEFIQSCALIHDDIVDASDTRRGNPTVHRAVEAQHRALGWTGNSADFGRSAAILIGDMSLVWAEDMFLDSGISQAAIQRAREPWRAMRTEVIGGQLLDVSLEAAAIESVELSDSVNRFKTAAYTIERPLHLGAAIAGASDKLIDAFRGYGRDIGIAFQLRDDQLGVFGDPQVTGKPAGDDLREGKRTVLMAIALQRADEQDPAAAKFLRENLGATDDPSVLSKMSQMIEDSGAPEEIEQRIDALTQSGLEYLAAANVNSEVTELLRSLAIKSTARAK

SEQ ID NO: 177 - protein, 358 aa, Corynebacterium sp. CCUG 69366
MTLDQIPEATTKLLAEFIHARSEQVAAIGGPVAEAVSHLESFILNGGKRIRPLYAWAGFIGGGGLTNTDEDPLAMLRAAASLEFIQACALIHDDIIDASDTRRGSPTVHRSVEARHRDAHWSGSSSHFGESVAILVGDLALVWAEDMFQDSGLSSEALARAREPWRAMRTEVIGGQLLDIALEAAASEDISAADSVNRFKTAAYTIERPLHLGAAIANAEADTISAFRGYGQDIGVAFQLRDDQLGVYGDPKLTGKPAGDDLREGKRTVLLATALRLADSSDPAAAAALRSGIGSTADPLELSHLADLIAGTGAVAEIEQRIEHLTESGLSHLATAHTSAEVTRTLTDLAIRATARRS

SEQ ID NO: 178 - protein, 359 aa, Corynebacterium sp. KPL1818
MTNIPELADIPGAVREKLAIFLDQRRDHVAEIGAPVSTAMSFLESFVLDGGKRVRPMYAWAGYLAAGRGSESPEAMLRAASSLEFIQACALIHDDIIDASNTRRGKPTVHREAERLHRESDFLGDPEFFGTSVAILVGDFALVYAEDMFQDSGLSSEALQRARDPWRGMRTEVLGGQLLDISLEAAGSESVALSNSVNRYKTAAYTIERPLHLGAAIAGASDELISAFRGYGHDIGIAYQLRDDQLGVFGDPEITGKPAGDDLREGKRTELLALALQRADERDPSAAATLRKFIGRTSDTQDLLRLSQIIADSGAPDEIERRITALTESGLAHLRAANVDPQITETLEHLAIQATTRQK

SEQ ID NO: 179 - protein, 359 aa, Corynebacterium accolens
MTNIPELADIPGAVREKLAIFLDQRREHVAEIGAPVSTAMSFLESFVLDGGKRVRPMYAWAGYLAAGRGSESPEAMLRAASSLEFIQACALIHDDIIDASNTRRGKPTVHREAERLHRESDFLGDPEFFGTSVAILVGDFALVYAEDMFQDSGLSPEALQRAREPWRGMRTEVLGGQLLDISLEAAGSESVALSNSVNRYKTAAYTIERPLHLGAAIAGAREELISAFRGYGHDIGIAYQLRDDQLGVFGDPAITGKPAGDDLREGKRTELLALALQRADERDPSAAATLRKFIGRTSDPQDLLRLSQIIADSGAPDEIERRITALTESGLAHLRAANVDPQITETLEHLAIQATTRQK

SEQ ID NO: 180 - protein, 359 aa, Corynebacterium segmentosum
MTNIPELADIPGAVREKLAIFLDQRRDHVAEIGAPVSTAMSFLESFVLDGGKRVRPMYAWAGYLAAGRGSESPEAMLRAASSLEFIQACALIHDDIIDASNTRRGKPTVHRGAERLHRESDFLGDPEFFGTSVAILVGDFALVYAEDMFQDSGLSPEALQRAREPWRGMRTEVLGGQLLDISLEAAGSESVALSNSVNRYKTAAYTIERPLHLGAAIAGASEELISAFRGYGYDIGIAYQLRDDQLGVFGDPAITGKPAGDDLREGKRTELLALALQRADERDPSAAATLRKFIGRTSDTQDLLRLSQIIADSGAPDEIERRITALTESGLAHLRAANVDPQITETLEHLAVQATTRQK

SEQ ID NO: 181 - protein, 359 aa, Corynebacterium macginleyi
MTNIPELADIPGAVREELTNFLDQRRDHVAEIGTPVSTAMSLLESFILDGGKRIRPIYAWAGYLAAGRGTESPEAMLRAASSLEFIQACALIHDDIIDASNTRRGKPTVHRKAEQLHRELDYLGDPEFFGTSVAILVGDFALVYAEDMFQDSGLSPEALQRARDPWRGMRTEVLGGQLLDISLEATGSESVSLSNSVNRYKTAAYTIERPLHLGAAIAGASEELITAFRGYGHDIGIAYQLRDDQLGVFGDPAVTGKPAGDDLREGKRTELLALALQRADEHDPSAAATLRKFIGRTSDPQDLLRLSQIIADSGAPAEIERRITALTTSGLAHLRAANVDSQITKTLEHLAIQATTRQK

SEQ ID NO: 182 - protein, 392 aa, Pseudomonas aeruginosa
MHHSRDAHTASPVREKDPATVSRSTTSPQFDARSLAFSEIEPAVEQKLREFFQGRSRKISVIGEPVSRAVTYLEDFVLGGGKRIRPSYAWAGFLAGNGLEGAEDPEAVLASISSLELIQACALIHDDIIDASDSRRGQPTVHRTAEARHRDNSWNGDSAHFGESIAILLGDLAFAWADDMFRTSGLSDAAIARTSNAWRGMRTEVIGGQLLDVFLESAGSESIELAENVNRFKTAAYTIERPLHIGAAIAGADGKIVRALRDYGRDIGVAYQLRDDLLGVFGNPAVTGKPAGDDLREGKRTVLVAKALELAHAADNADAVESIRKGVGTVTEPHDIARLADTIRQTGAEAGVEKRIDELAERGISHLCTADISDDARNILVSLANKATARSM

SEQ ID NO: 183 - protein, 368 aa, Streptococcus thermophilus
MVTHTDKSSIPTTAQIPAAVERELELFFTEHGPSVDVIGPPVSEAVEHLRTFVLGGGKRIRPTFGWVGFIGANGLDNTDEDPAAVLRAVSSLELIQACALIHDDIIDASASRRGNPTVHVAAAESHRHQNWLGNSEKFGESLAILVGDLALVWADDMWHHSGLSHAALDRAAEPWRGMRTEVIGGQILDISLEAAGCEDEELANAVNRFKTAAYTIERPLHLGAAIAGADDDTIAALRGYGHDIGIAFQLRDDILGVFGDPVVTGKPAGDDLREGKRTVLYSRALQAADEHDPAAAQRLRDGIGTALAPDEIAELSGIIQETGAVDDVEKRIDELTESGLEHVRRAALSPEAVETLETLAIKATARRM

SEQ ID NO: 184 - protein, 406 aa, Nocardia vermiculata
MRSPGRRYPRPPAIGGTRRRIGQCPRADTTIYLEVALSVGPSGPANPAPSDSAALVHAVEQALTRFFDSRRELVAELGPVFVSATTALEEFVLRGGKRTRPSFAWTGWLGAGGDPTGPHAEAVLTACSALELVQACALIHDDIIDSSRTRRGFPTVHVDFEDRHRTRSWGGDPAHFGASVAILVGDLALTWADDMVAAAGLDPAARARFAVVWAAMRTEVMGGQLLDVHGEAGADDSVAAALRINRYKTAAYTVERPLHLGAALAGADPELIAAYREFGTDIGIAFQLRDDLLGVFGDPAVTGKPSGDDLREGKRTVLVAEALRRADSTDPEAARRLRTCLGTDLDAEQVTGLREIITDLGAVDDVERRISELTERGLTALASSSVAPDAGARLRAMALAATRRVA

SEQ ID NO: 185 - protein, 383 aa, Rhodococcus sp. 1168
MEDPLSRDSTLPAPRRTSDPDPVLREAGTAPIALVESALAEFFHSRREQVARVGGGYVSAVADLEAFVLRGGKRIRPSFGWMAWLGAGGDHRSPQAASVLRACASLELIQACALIHDDIIDASLTRRGFPTVHVGFTARHRAARWSGSPERFGESAAILLGDLALCWADDMLRESGIGHDAMGRVSPVWSAMRTEVLGGQLLDIEAEAGLDESVEAAMRVNRYKTAAYTVERPLQLGAVLAGASESLVDAYRSFGTDIGLAFQLRDDLLGVFGDPAVTGKPSGDDIREGKRTVLMAVGLQLADRDRPEAGSLLRSSLGVVDLTEDTIESIRTVLIELGAVADVERRISELTDRALDTLKASAVEPHAAAQLRAMSIAATQRTY

SEQ ID NO: 186 - protein, 361 aa, Clostridium paraputrificum
MSPLDVPAAVTGALTDFFGARAGMVADIDEEFSRVIGALSDFTLLGGKRVRPAFAWAGWLGAGGDAGLCADAEDPEAVFRSVCALEFIQACALIHDDIIDASATRRGNPTVHKVFESRHRDNGWRGDAGHYGQSVAILAGDVALAWADDMFHGSGLSDAARNRAREPWWRMRTEVLGGQLLDITAEASGDSRVGVAEKVNRFKTAAYTIERPLHIGAAIAGADDAIVDAYREFGLDIGIAFQLRDDQLGVFGDPAVTGKPAGDDLREGKRTVLVGTALARLRESDPDGARHLDDKLGRVDGQDDVDELRELIRGSGADELLEVEIDRLTRRGLAALDSAPIVDEQRERLAEMGRRATARAW

SEQ ID NO: 187 - protein, 378 aa, Nocardia cyriacigeorgica
MEVILSAGPGTPTRPSPTSATPGTPAFAAAVEQALTSFFATRRETVGELGPIFVDAAEALESFVLRGGKRTRPGFAWTGWLGAGGDPDGPDAPAVLNACAALELVQACALIHDDIIDASRTRRRFPTVHVDFEQRHRDRGWAGDAPRFGTGVAILIGDLALAWADDMVHASGLDPRAVARFATVWAKMRTEVLGGQLLDIHGEASGDESVAAALRINRYKTAAYTVERPLHLGAALADAGPELVRSYRDFGTDIGIAFQLRDDLLGVFGDPSVTGKPSGDDLREGKRTVLIAEALARGDKADPAAAELLRTKVGTDLSGEDVDQLREVLVRLGAVDAVEARIAELTERALAAIDTSSATPAAKDHLHAMALAATRRTA

SEQ ID NO: 188 - protein, 374 aa, Nocardia concava
MKEAPLSAGPGTPTRHPVGAGSVVAAVEERLRAFFVTREPIVEPLGPVFVDAARALQDFVIRGGKRTRPSFAWTGWLGAGRSPEDPEADAVLTACSALELVQACALIHDDIIDSSRTRRGFPTVHVDYEGRHRDQRWRGDADHYGISVAVLIGDLALAWADDMTRDAGLPDDAAARFAPVWAAMRTEVLGGQLLDIHGESAGDETVEAALRINRYKTAAYTIERPLHMGAALAGASPELVAAYREFGTDIGIAFQLRDDLLGVFGDPAVTGKPSGDDLREGKRTVLIAEALQRADIDAPAVADLIRSSLGTDVTPERVTELRTALTELGAVDAVEKRISSLTDQALTALDASTATPEAKRQLRAMALAATARTY

SEQ ID NO: 189 - protein, 383 aa, Rhodococcus yunnanensis
MEDPLSGDLTSHTTRESTEHDFAVHDATANPATLVESALEAFFASKRPQVAAVGGGYPAAVEDLVAFVLRGGKRIRPAFAWTAWLGAGGDRSSTSAPSVLRACASLELIQACALIHDDIIDASVTRRGYPTVHIGFADRHRGLGWSGSAERFGESAAILLGDLALCWADDMLREAGLDSDTAARISPVWSSMRTEVLGGQLLDIEAEAGLDESVDAAMRVNRFKTAAYTVERPLHLGALLAGAPSELVESYRAFGSDIGSAFQLRDDLLGVFGDPGVTGKPSGDDIREGKRTVLMAVGMQLADRDRPDLAALLRTSLGDADLAEDDIRAIRTALTELGAVDDVERRITELTERALGTLDGSTVEPGAAARLRAMAVSATQRQY

SEQ ID NO: 190 - protein, 618 aa, Ralstonia solanacearum (strain GMI1000)
MSSVEIAELQAAAGEAAQDAAAAPRKTGLAALLALAGERKGSLVLAAALSALSSVLSLAPLLVIYAVLMLIGQDRVAASALWPILGWGALAIGLRWLLLVASGVVAHLAAFDILLDLRLKVAAKLTRLPLGWITKQSAEATNKVLREDVDRLELFIAHHLNDSAAAVALPLASAVALFWFDWRMALVTLATVPVAALVQILLWKKIPEVMAQYNEVNASLSASVVEYVQGIAVLKTYHRGALASKRLTRVIDAYRAVIARMVRMTVPGWSAFTVVIGANMLSILPFGGYWYLQGSLSLELFVLCLLLGLGITRPLFALAFFGSLLRLIQDSHGRVQNLMQAPELTDAPAAGKPADSTVAFEGVGFAYGDKDVLHEVSFTVPAGSFTAIVGPSGAGKSTLAQLLARFWDVGRGAIRIGGVDVRALPLGDMHRQVAYVMQDVFLFNDTVLENIRLGQRELDEAQVIAAAKAAQAHDFISRLPQGYHTVLGERGARLSGGEKQRLSIARALVKDAPIIVLDEATAFTDPMSEAQILDALGVLTQSKTVIVIAHRLSTIADADQIVLLDHGRVAAAGTHAQLLAGSDLYRRLWRMHRDSADWRLPSAHATASADQPLEGVSQ

SEQ ID NO: 191 - protein, 581 aa, Ralstonia solanacearum (strain GMI1000)
MNMLRAVFELTRSADRGRVRRGIAWRMAEALFATAPYAVLFLAFNAMFAGRFDAALLTTLTLALLGCVLAQLACAVAANLDGFIGGTGMMCDLRLQIAEQLRRLPLGFYARRQTGDLSAVMAENVVQVEDAFTHLTGELCGRLAIAGLTGALLLSIDWRLGLLAFASVAAGLLLFRLFKRAAGRLGRAKLDQKAETNSRLLEFVQGIKVIRAFGLSAERFDKVFNALTRLRALSVRIEVVAGAAAIGFSVLLEIGFLLVLAQAFRFSLAGHLTHAMLMMFLIMSHRFFSMMSESAMLMAQLAFYSRSFDRIAALMGEPLLPEPDASTAARGCAVEFRYVSFSHAPGEPTLRGVSFVARPDTVTALVGPSGAGKSTLAHLVARFHDVEAGQVLIGGVDVRAMRQDDLLDRIAIVFQDTYLLNDSIENNLRLARPEASDADLVAAARAACCHDFIMALPDGYRSVIGEGGGRLSGGERQRLSIARALLKDAPIVLLDEATASIDSGNELAIRQALAALVRGKTVLVIAHRLHTVADADQILVLERGRVVERGRHPDLLAGGGLYARLWAQQARTRNWRFRAAA

SEQ ID NO: 192 - protein, 691 aa, Ralstonia solanacearum (strain GMI1000)
MGVSTLRGLLLAGSTLGAVGAAGAQDSATAAEPADVAQLAPVVVTGTKLDASGQTADSATSVASGARLQAAGVARTDELGKLFPELTVTPRSSRAYTLFGMRGTPSSDFYSPAVTVYVDGVPQDMAYFTQPLPDVEQVEVLRGPQGTLYGRAAQGGVINIVTTKPNNRFGAQASVDVNNLTRRTDLSVRGPLVKDLLYGDVSAYFDDRPGTLKNPATGADQLDSGREALGRARLRWTPRDTDLDATLSVSHDRYRSHEEYFQAYDLKDRHAIASSPFDLTEPSLTRTVTQAALSVDYYLRGWKLSSVSAYQDRRLERVLTTGNADPENQKTFSQELRVATSGDVKRPVDGVFGLYYEKQAFERDRGIAVPGVSAFLFPGPSRSESNLRSMAAFGEGVWHATERLDLTAGLRYGIDSADIHYNRTGAAALSFAGDKTFRSLTPKVSVGYQAAPGWRVYGLYSEGYKAGGFNRIADNSAGSIPYSAERLRNVEVGFQADLLGKRLRLDGALFHSRTSNLQAQVVSGLFQMLSNVGDARATGVELNGTWLATPDLTLRAGGAWTTSKIYSYSAPQGNLDLTGKRVPYVVPLSLRASGEYRFRPQGMRGRLRWNVGMTYSGDMWFDAANTLRQPAYALLDTSLSWDINKHLTVVGYVDNLTDRAVRTYAFSLGTFGTFAQYGQGRTIGLRLQARL

SEQ ID NO: 193 - protein, 413 aa, Escherichia coli O6:H1 (strain CFT073 / ATCC 700928 / UPEC)
MSKRRVVVTGLGMLSPVGNTVESTWKALLAGQSGISLIDHFDTSAYATKFAGLVKDFNCEDIISRKEQRKMDAFIQYGIVAGVQAMQDSGLEITEENATRIGAAIGSGIGGLGLIEENHTSLMNGGPRKISPFFVPSTIVNMVAGHLTIMYGLRGPSISIATACTSGVHNIGHAARIIAYGDADVMVAGGAEKASTPLGVGGFGAARALSTRNDNPQAASRPWDKERDGFVLGDGAGMLVLEEYEHAKKRGAKIYAELVGFGMSSDAYHMTSPPENGAGAALAMANALRDAGIEASQIGYVNAHGTSTPAGDKAEAQAVKTIFGEAASRVLVSSTKSMTGHLLGAAGAVESIYSILALRDQAVPPTINLDNPDEGCDLDFVPHEARQVSGMEYTLCNSFGFGGTNGSLIFKKI

SEQ ID NO: 194 - protein, 406 aa, Escherichia coli O6:H1 (strain CFT073 / ATCC 700928 / UPEC)
MKRAVITGLGIVSSIGNNQQEVLASLREGRSGITFSQELKDSGMRSHVWGNVKLDTTGLIDRKVVRFMSDASIYAFLSMEQAIADAGLSPEAYQNNPRVGLIAGSGGGSPRFQVFGADAMRGPRGLKAVGPYVVTKAMASGVSACLATPFKIHGVNYSISSACATSAHCIGNAVEQIQLGKQDIVFAGGGEELCWEMACEFDAMGALSTKYNDTPEKASRTYDAHRDGFVIAGGGGMVVVEELEHALARGAHIYAEIVGYGATSDGADMVAPSGEGAVRCMKMAMHGVDTPIDYLNSHGTSTPVGDVKELAAIREVFGDKSPAISATKAMTGHSLGAAGVQEAIYSLLMLEHGFIAPSINIEELDEQAAGLNIVTETTDRELTTVMSNSFGFGGTNATLVMRKLKD

SEQ ID NO: 195 - protein, 317 aa, Escherichia coli (strain UTI89 / UPEC)
MYTKIIGTGSYLPEQVRTNADLEKMVDTSDEWIVTRTGIRERHIAAPNETVSTMGFEAATRAIEMAGIEKDQIGLIVVATTSATHAFPSAACQIQSMLGIKGCPAFDVAAACAGFTYALSVADQYVKSGAVKYALVVGSDVLARTCDPTDRGTIIIFGDGAGAAVLAASEEPGIISTHLHADGSYGELLTLPNADRVNPENSIHLTMAGNEVFKVAVTELAHIVDETLAANNLDRSQLDWLVPHQANLRIISATAKKLGMSMDNVVVTLDRHGNTSAASVPCALDEAVRDGRIKPGQLVLLEAFGGGFTWGSALVRF

SEQ ID NO: 196 - protein, 262 aa, Escherichia coli (strain K12)
MGFLSGKRILVTGVASKLSIAYGIAQAMHREGAELAFTYQNDKLKGRVEEFAAQLGSDIVLQCDVAEDASIDTMFAELGKVWPKFDGFVHSIGFAPGDQLDGDYVNAVTREGFKIAHDISSYSFVAMAKACRSMLNPGSALLTLSYLGAERAIPNYNVMGLAKASLEANVRYMANAMGPEGVRVNAISAGPIRTLAASGIKDFRKMLAHCEAVTPIRRTVTIEDVGNSAAFLCSDLSAGISGEVVHVDGGFSIAAMNELELK

SEQ ID NO: 197 - protein, 208 aa, Escherichia coli (strain K12)
MMNFNNVFRWHLPFLFLVLLTFRAAAADTLLILGDSLSAGYRMSASAAWPALLNDKWQSKTSVVNASISGDTSQQGLARLPALLKQHQPRWVLVELGGNDGLRGFQPQQTEQTLRQILQDVKAANAEPLLMQIRLPANYGRRYNEAFSAIYPKLAKEFDVPLLPFFMEEVYLKPQWMQDDGIHPNRDAQPFIADWMAKQLQPLVNHDS

SEQ ID NO: 198 - protein, 132 aa, Escherichia coli (strain K12)
MQTQIKVRGYHLDVYQHVNNARYLEFLEEARWDGLENSDSFQWMTAHNIAFVVVNININYRRPAVLSDLLTITSQLQQLNGKSGILSQVITLEPEGQVVADALITFVCIDLKTQKALALEGELREKLEQMVK

SEQ ID NO: 199 - protein, 239 aa, Escherichia coli (strain UTI89 / UPEC)
MVIKAQSPAGFAEEYIIESIWNNRFPPGTILPAERELSELIGVTRTTLREVLQRLARDGWLTIQHGKPTKVNNFWETSGLNILETLARLDHESVPQLIDNLLSVRTNISTIFIRTAFRQHPDKAQEVLATANEVADHADAFAELDYNIFRGLAFASGNPIYGLILNGMKGLYTRIGRHYFANPEARSLALGFYHKLSALCSEGAHDQVYETVRRYGHESGEIWHRMQKNLPGDLAIQGR

SEQ ID NO: 200 - protein, 249 aa, Pseudomonas
MILELDCGNSFIKWRVIHAADAVIEGGGIVDSDQALLAEVAALASVRLTGCRIVSVRSEEETDALCSLIAQAFTVQARVAHPAREMAGVRNGYDDYQRLGMDRWLAALGAFHLAKGACLVIDLGTAAKADFVAADGEHLGGYICPGMPLMRSQLRTHTRRIRYDDASAERALTSLSPGRSTVEAVERGCVLMLQGFARTQLDQARVLWGDTFTVFLTGGDAPLVREAVPQARVVPDLVFVGLAMACPLD

SEQ ID NO: 201 - DNA, 78 bp, Artificial
  Oligonucleotide
gttttagagctagaaatagcaagttaaaataaggctagtccgttatcaacttgaaaaagtggcaccgagtcggtgctt

SEQ ID NO: 202 - DNA, 20 bp, Artificial
  Oligonucleotide
acaatcatccatgcatcgcg

SEQ ID NO: 203 - protein, 20 aa, Artificial
  Oligonucleotide
GTACACGTAGTGGATGCTGA

SEQ ID NO: 204 - DNA, 20 bp, Artificial
  Oligonucleotide
ccgcaatgataacccgcaag

SEQ ID NO: 205 - DNA, 20 bp, Artificial
  Oligonucleotide
ccgcttgcgggttatcattg

SEQ ID NO: 206 - DNA, 20 bp, Artificial
  Oligonucleotide
atcgggatgctgacgaaacg

SEQ ID NO: 207 - DNA, 20 bp, Artificial
  Oligonucleotide
cattaaggcgcaaagcccgg

SEQ ID NO: 208 - protein, 2237 aa, Saccharomyces cerevisiae
MSEESLFESSPQKMEYEITNYSERHTELPGHFIGLNTVDKLEESPLRDFVKSHGGHTVISKILIANNGIAAVKEIRSVRKWAYETFGDDRTVQFVAMATPEDLEANAEYIRMADQYIEVPGGTNNNNYANVDLIVDIAERADVDAVWAGWGHASENPLLPEKLSQSKRKVIFIGPPGNAMRSLGDKISSTIVAQSAKVPCIPWSGTGVDTVHVDEKTGLVSVDDDIYQKGCCTSPEDGLQKAKRIGFPVMIKASEGGGGKGIRQVEREEDFIALYHQAANEIPGSPIFIMKLAGRARHLEVQLLADQYGTNISLFGRDCSVQRRHQKIIEEAPVTIAKAETFHEMEKAAVRLGKLVGYVSAGTVEYLYSHDDGKFYFLELNPRLQVEHPTTEMVSGVNLPAAQLQIAMGIPMHRISDIRTLYGMNPHSASEIDFEFKTQDATKKQRRPIPKGHCTACRITSEDPNDGFKPSGGTLHELNFRSSSNVWGYFSVGNNGNIHSFSDSQFGHIFAFGENRQASRKHMVVALKELSIRGDFRTTVEYLIKLLETEDFEDNTITTGWLDDLITHKMTAEKPDPTLAVICGAATKAFLASEEARHKYIESLQKGQVLSKDLLQTMFPVDFIHEGKRYKFTVAKSGNDRYTLFINGSKCDIILRQLSDGGLLIAIGGKSHTIYWKEEVAATRLSVDSMTTLLEVENDPTQLRTPSPGKLVKFLVENGEHIIKGQPYAEIEVMKMQMPLVSQENGIVQLLKQPGSTIVAGDIMAIMTLDDPSKVKHALPFEGMLPDFGSPVIEGTKPAYKFKSLVSTLENILKGYDNQVIMNASLQQLIEVLRNPKLPYSEWKLHISALHSRLPAKLDEQMEELVARSLRRGAVFPARQLSKLIDMAVKNPEYNPDKLLGAVVEPLADIAHKYSNGLEAHEHSIFVHFLEEYYEVEKLFNGPNVREENIILKLRDENPKDLDKVALTVLSHSKVSAKNNLILAILKHYQPLCKLSSKVSAIFSTPLQHIVELESKATAKVALQAREILIQGALPSVKERTEQIEHILKSSVVKVAYGSSNPKRSEPDLNILKDLIDSNYVVFDVLLQFLTHQDPVVTAAAAQVYIRRAYRAYTIGDIRVHEGVTVPIVEWKFQLPSAAFSTFPTVKSKMGMNRAVSVSDLSYVANSQSSPLREGILMAVDHLDDVDEILSQSLEVIPRHQSSSNGPAPDRSGSSASLSNVANVCVASTEGFESEEEILVRLREILDLNKQELINASIRRITFMFGFKDGSYPKYYTFNGPNYNENETIRHIEPALAFQLELGRLSNFNIKPIFTDNRNIHVYEAVSKTSPLDKRFFTRGIIRTGHIRDDISIQEYLTSEANRLMSDILDNLEVTDTSNSDLNHIFINFIAVFDISPEDVEAAFGGFLERFGKRLLRLRVSSAEIRIIIKDPQTGAPVPLRALINNVSGYVIKTEMYTEVKNAKGEWVFKSLGKPGSMHLRPIATPYPVKEWLQPKRYKAHLMGTTYVYDFPELFRQASSSQGKNFSADVKLTDDFFISNELIEDENGELTEVEREPGANAIGMVAFKITVKTPEYPRGRQFVVVANDITFKIGSFGPQEDEFFNKVTEYARKRGIPRIYLAANSGARIGMAEEIVPLFQVAWNDAANPDKGFQYLYLTSEGMETLKKFDKENSVLTERTVINGEERFVIKTIIGSEDGLGVECLRGSGLIAGATSRAYHDIFTITLVTCRSVGIGAYLVRLGQRAIQVEGQPIIWYRCLLTGAPESTNAGREVYTSNLQLGGTQIMYNNGVSHLTAVDDLAGVEKIVEWMSYVPAKRNMPVPILETKDTWDRPVDFTPTNDETYDVRWMIEGRETESGFEYGLFDKGSFFETLSGWAKGVVVGRARLGGIPLGVIGVETRTVENLIPADPANPNSAETLIQEPGQVWHPNSAFKTAQAINDFNNGEQLPMMILANWRGFSGGQRDMFNEVLKYGSFIVDALVDYKQPIIIYIPPTGELRGGSWVVVDPTINADQMEMYADVNARAGVLEPQGMVGIKFRREKLLDTMNRLDDKYRELRSQLSNKSLAPEVHQQISKQLADRERELLPIYGQISLQFADLHDRSSRMVAKGVISKELEWTEARRFFFWRLRRRLNEEYLIKRLSHQVGEASRLEKIARIRSWYPASVDHEDDRQVATWIEENYKTLDDKLKGLKLESFAQDLAKKIRSDHDNAIDGLSEVIKMLSTDDKEKLLKTLK

SEQ ID NO: 209 - protein, 2266 aa, Yarrowia lipolytica
MRLQLRTLTRRFFSMASGSSTPDVAPLVDPNIHKGLASHFFGLNSVHTAKPSKVKEFVASHGGHTVINKVLIANNGIAAVKEIRSVRKWAYETFGDERAISFTVMATPEDLAANADYIRMADQYVEVPGGTNNNNYANVELIVDVAERSGVDAVWAGWGHASENPLLPESLAASPRKIVFIGPPGAAMRSLGDKISSTIVAQHAKVPCIPWSGTGVDEVVVDKSTNLVSVSEEVYTKGCTTGPKQGLEKAKQIGFPVMIKASEGGGGKGIRKVEREEDFEAAYHQVEGEIPGSPIFIMQLAGNARHLEVQLLADQYGNNISLFGRDCSVQRRHQKIIEEAPVTVAGQQTFTAMEKAAVRLGKLVGYVSAGTVEYLYSHEDDKFYFLELNPRLQVEHPTTEMVTGVNLPAAQLQIAMGIPLDRIKDIRLFYGVNPHTTTPIDFDFSGEDADKTQRRPVPRGHTTACRITSEDPGEGFKPSGGTMHELNFRSSSNVWGYFSVGNQGGIHSFSDSQFGHIFAFGENRSASRKHMVVALKELSIRGDFRTTVEYLIKLLETPDFEDNTITTGWLDELISNKLTAERPDSFLAVVCGAATKAHRASEDSIATYMASLEKGQVPARDILKTLFPVDFIYEGQRYKFTATRSSEDSYTLFINGSRCDIGVRPLSDGGILCLVGGRSHNVYWKEEVGATRLSVDSKTCLLEVENDPTQLRSPSPGKLVKFLVENGDHVRANQPYAEIEVMKMYMTLTAQEDGIVQLMKQPGSTIEAGDILGILALDDPSKVKHAKPFEGQLPELGPPTLSGNKPHQRYEHCQNVLHNILLGFDNQVVMKSTLQEMVGLLRNPELPYLQWAHQVSSLHTRMSAKLDATLAGLIDKAKQRGGEFPAKQLLRALEKEASSGEVDALFQQTLAPLFDLAREYQDGLAIHELQVAAGLLQAYYDSEARFCGPNVRDEDVILKLREENRDSLRKVVMAQLSHSRVGAKNNLVLALLDEYKVADQAGTDSPASNVHVAKYLRPVLRKIVELESRASAKVSLKAREILIQCALPSLKERTDQLEHILRSSVVESRYGEVGLEHRTPRADILKEVVDSKYIVFDVLAQFFAHDDPWIVLAALELYIRRACKAYSILDINYHQDSDLPPVISWRFRLPTMSSALYNSVVSSGSKTPTSPSVSRADSVSDFSYTVERDSAPARTGAIVAVPHLDDLEDALTRVLENLPKRGAGLAISVGASNKSAAASARDAAAAAASSVDTGLSNICNVMIGRVDESDDDDTLIARISQVIEDFKEDFEACSLRRITFSFGNSRGTYPKYFTFRGPAYEEDPTIRHIEPALAFQLELARLSNFDIKPVHTDNRNIHVYEATGKNAASDKRFFTRGIVRPGRLRENIPTSEYLISEADRLMSDILDALEVIGTTNSDLNHIFINFSAVFALKPEEVEAAFGGFLERFGRRLWRLRVTGAEIRMMVSDPETGSAFPLRAMINNVSGYVVQSELYAEAKNDKGQWIFKSLGKPGSMHMRSINTPYPTKEWLQPKRYKAHLMGTTYCYDFPELFRQSIESDWKKYDGKAPDDLMTCNELILDEDSGELQEVNREPGANNVGMVAWKFEAKTPEYPRGRSFIVVANDITFQIGSFGPAEDQFFFKVTELARKLGIPRIYLSANSGARIGIADELVGKYKVAWNDETDPSKGFKYLYFTPESLATLKPDTVVTTEIEEEGPNGVEKRHVIDYIVGEKDGLGVECLRGSGLIAGATSRAYKDIFTLTLVTCRSVGIGAYLVRLGQRAIQIEGQPIILTGAPAINKLLGREVYSSNLQLGGTQIMYNNGVSHLTARDDLNGVHKIMQWLSYIPASRGLPVPVLPHKTDVWDRDVTFQPVRGEQYDVRWLISGRTLEDGAFESGLFDKDSFQETLSGWAKGVVVGRARLGGIPFGVIGVETATVDNTTPADPANPDSIEMSTSEAGQVWYPNSAFKTSQAINDFNHGEALPLMILANWRGFSGGQRDMYNEVLKYGSFIVDALVDYKQPIMVYIPPTGELRGGSWVVVDPTINSDMMEMYADVESRGGVLEPEGMVGIKYRRDKLLDTMARLDPEYSSLKKQLEESPDSEELKVKLSVREKSLMPIYQQISVQFADLHDRAGRMEAKGVIREALVWKDARRFFFWRIRRRLVEEYLITKINSILPSCTRLECLARIKSWKPATLDQGSDRGVAEWFDENSDAVSARLSELKKDASAQSFASQLRKDRQGTLQGMKQALASLSEAERAELLKGL

SEQ ID NO: 210 - protein, 512 aa, Streptomyces sp. CNQ-509
MATQSADAAAGPGPGAAGAAEPDPKRWLILVVICVAQLMVVLDATIMNLALPSAQEDLGFSLANRQWIVTAYAVAFGSLLLFCGRLVLLFGLKRSFLVGLAGFAGASAVGGAANSFEMLVSARVGQGVFAALLAPATLTLLTTTFTDPKEKGKAFGAYGAVAASGAGLGLIIGGALTSGLSWRWCMYVNLLFAGVALLGAGLPFGRNAAVRSMRTKLDFPGVILVSAAMFCIVYGFSNAANEDWSTPQTWGFLVAGGVLLVAFAAWQTRAAHPLLPPRVVLDRNRSGAYLLMLLVGAGIFGFFLFLIYYMQTTLDYSAIASGVALLPMVVFTAVAVNIGNIKIMPKYGPKPLVIAGLTLNAGALVWLTRVEVDSGYAAALLGPILVLGFGMGFIFAAALQTGTTGVEPQDAGIASASIQVGQQLGGSLGTALLNTIAASAITDYVKEHAQGRPPTEELLQLAAVDSYVTVFWWCAGLFAAGAVICGLLIRSGPLPAPAFGAKPVDKAEKAPS

SEQ ID NO: 211 - protein, 512 aa, Streptomyces sp. CNQ-509
METRSAAPAGGPGSEALGDPRRWLILAVICTAYLMVGLDLTVMNLALPSAQEALEFSDSDRQWIVTAYALPFGSLLLFSGRLSDIIGRKESFLIGLTGFAGASAVGGAATNFEMLVTARACQGAFASMLAPACLALLATTFHDPKEKAKAFGIYSAVAASGAGLGLILGGALVSALNWRWCMYVNLVFAVVAFAGSVMLMQRETRTGAKLDVPGVVLASGGMFCLVYGFANAADEGWGTTSTWGVLALGGVLLLVFAFSQTRAANPLLPPRILLDRNRGGAYFTVLLVGTGMFGVMLFLIYYMQTNLDYSAITSGVALLPMVVCTTVGASAGAIKLMPTYGPRPLVTFGLVLSALGMAWLTVIGVDSGYVTHLLGPLMVVGLGMGFIYAAALRTGTSGVEPRDAGIASACVNTGQQLGGAVGTALLNTIAATATGNWLESNVQGQPSQSQLDLAAIDGYTTVFWWCTALFAIGAVVSGLLLRGGPLPTPAEEPAEEKADGEPEELSEETKTA

SEQ ID NO: 212 - protein, 512 aa, Streptomyces sp. CNQ-509; identical to SEQ ID NO: 210

SEQ ID NO: 213 - protein, 509 aa, Escherichia coli
MATQNADPASERDPAAAGTAGAEPRRWLILGVICVAQLMVVLDVTVMNLALPSAQDDLDITDADRQWIVTAYSLAFGSLLLFCGRLVDLIGRKATFLIGAGGFAAASAVGGAAVNFEMLVTARACQGAFGALLAPAALALLTTTFTDPKERGKAFGAFGAVAASGAGLGLILGGSLTSSLSWRWCMYINLLFAGIVMLGASLPMAKGVRKPGARLDIPGVVAVSGSMFCLVYGFSNAASHSWGTPSTWGFLAAGGVLLLVFVLWQARAAQPLLPPWLVLDRNRGGAYLTMLIVGACMFGIFLFLVYYMQTTLDYSAITSGVALLPMVVLTAVGANVGNIVVMPRFGPKPLVIAGLLLNATGMALLTGIDVDSAYASALLGPTMVSGLGMGFIFASVLRTGTSGVAPQDAGIASASISTGQQLGGAIGTALLNSIAAGATTAYLDSHVQGRPTPAQFHLAAIDGYTTVFWWCSAIFAAGAVICGTLLRSGPLPSPVGAPGPVPAKLPETA

SEQ ID NO: 214 - protein, 505 aa, Streptomyces sp. CNH189
MATSAAPAAGPSSGAAADPKRWLILAVVCTAYLMVGLDLTVMNLALPSAQEALEFTDADRQWIVTAYALPFGGLLLFFGRLSDLFGRKETFLIGLTGFAIASAVGGAANSFGMLVTARACQGVFAAMLAPACLALLTTTFTDPKEKAKAFGAYSAVAASGTGLGLIIGGVLTDGLSWRWCMYVNLLFAGVAFVGGIALLHKQPRTGARMDLPGVLLGTGGMFSLVYGFSNAADDSWSTPGTWGFLALGGVLLAVFAFWQTRAAQPLLPPRIVLDRNRGGAYLAVLFVGTGVFGVMLFLIYYMQTDLDYSAIVSGVSLLPLIVLTGVGANVGGVKLMPKTGPRPLVTAGLLLTAAAMAWLTRIGPDSGYATHLLGPTMVAGLGMGLIFAAVLRTGTSGVAPEDAGIASACVNTGQQIGGAIGVALLNTIAATATTDWLKSNVQGQPTPEQLSSASIEGYTTVFWWCTAIFAAGAVVSALLLRGGPLPESEDTLAGSPAEQPETTHS

SEQ ID NO: 215 - protein, 582 aa, Escherichia coli (strain K12)
MHNDKDLSTWQTFRRLWPTIAPFKAGLIVAGVALILNAASDTFMLSLLKPLLDDGFGKTDRSVLVWMPLVVIGLMILRGITSYVSSYCISWVSGKVVMTMRRRLFGHMMGMPVSFFDKQSTGTLLSRITYDSEQVASSSSGALITVVREGASIIGLFIMMFYYSWQLSIILIVLAPIVSIAIRVVSKRFRNISKNMQNTMGQVTTSAEQMLKGHKEVLIFGGQEVETKRFDKVSNRMRLQGMKMVSASSISDPIIQLIASLALAFVLYAASFPSVMDSLTAGTITVVFSSMIALMRPLKSLTNVNAQFQRGMAACQTLFTILDSEQEKDEGKRVIERATGDVEFRNVTFTYPGRDVPALRNINLKIPAGKTVALVGRSGSGKSTIASLITRFYDIDEGEILMDGHDLREYTLASLRNQVALVSQNVHLFNDTVANNIAYARTEQYSREQIEEAARMAYAMDFINKMDNGLDTVIGENGVLLSGGQRQRIAIARALLRDSPILILDEATSALDTESERAIQAALDELQKNRTSLVIAHRLSTIEKADEIVVVEDGVIVERGTHNDLLEHRGVYAQLHKMQFGQ

SEQ ID NO: 216 - protein, 371 aa, Escherichia coli (strain K12)
MKKRKTVKKRYVIALVIVIAGLITLWRILNAPVPTYQTLIVRPGDLQQSVLATGKLDALRKVDVGAQVSGQLKTLSVAIGDKVKKDQLLGVIDPEQAENQIKEVEATLMELRAQRQQAEAELKLARVTYSRQQRLAQTKAVSQQDLDTAATEMAVKQAQIGTIDAQIKRNQASLDTAKTNLDYTRIVAPMAGEVTQITTLQGQTVIAAQQAPNILTLADMSAMLVKAQVSEADVIHLKPGQKAWFTVLGDPLTRYEGQIKDVLPTPEKVNDAIFYYARFEVPNPNGLLRLDMTAQVHIQLTDVKNVLTIPLSALGDPVGDNRYKVKLLRNGETREREVTIGARNDTDVEIVKGLEAGDEVVIGEAKPGAAQ

SEQ ID NO: 217 - protein, 590 aa, Escherichia coli (strain K12)
MRLFAQLSWYFRREWRRYLGAVALLVIIAMLQLVPPKVVGIVVDGVTEQHFTTGQILMWIATMVLIAVVVYLLRYVWRVLLFGASYQLAVELREDYYRQLSRQHPEFYLRHRTGDLMARATNDVDRVVFAAGEGVLTLVDSLVMGCAVLIMMSTQISWQLTLFSLLPMPVMAIMIKRNGDALHERFKLAQAAFSSLNDRTQESLTSIRMIKAFGLEDRQSALFAADAEDTGKKNMRVARIDARFDPTIYIAIGMANLLAIGGGSWMVVQGSLTLGQLTSFMMYLGLMIWPMLALAWMFNIVERGSAAYSRIRAMLAEAPVVNDGSEPVPEGRGELDVNIHQFTYPQTDHPALENVNFALKPGQMLGICGPTGSGKSTLLSLIQRHFDVSEGDIRFHDIPLTKLQLDSWRSRLAVVSQTPFLFSDTVANNIALGCPNATQQEIEHVARLASVHDDILRLPQGYDTEVGERGVMLSGGQKQRISIARALLVNAEILILDDALSAVDGRTEHQILHNLRQWGQGRTVIISAHRLSALTEASEIIVMQHGHIAQRGNHDVLAQQSGWYRDMYRYQQLEAALDDAPENREEAVDA

SEQ ID NO: 218 - protein, 308 aa, Escherichia coli (strain K12) [sequence omitted]

SEQ ID NO: 219 - protein, 228 aa, Escherichia coli (strain K12)
MPAENIVEVHHLKKSVGQGEHELSILTGVELVVKRGETIALVGESGSGKSTLLAILAGLDDGSSGEVSLVGQPLHNMDEEARAKLRAKHVGFVFQSFMLIPTLNALENVELPALLRGESSAESRNGAKALLEQLGLGKRLDHLPAQLSGGEQQRVALARAFNGRPDVLFADEPTGNLDRQTGDKIADLLFSLNREHGTTLIMVTHDLQLAARCDRCLRLVNGQLQEEA

SEQ ID NO: 220 - protein, 561 aa, Escherichia coli (strain K12)
MITIPITLRMLIAKYLCLLKPFWLRKNNKTSVLLIIIILAMILGVVKIQVWLNDWNNDFFNALSQKETDKLWQLVLWFPALLGIFVLISVNKTWLIKLLTIRWREWLTDYYLNRWFADKNYYFTQIYGEHKNTDNPDQRIAEDILLLISKTLSLSFGFIQSLSMLITFTVILWESAGTLSFTVGGTEWNIQGYMVYTVVLIVIGGTLFTHKVGKRIRPLNVEKQRSEATFRTNLVQHNKQAELIALSNAESLQRQELSDNFHTIKENWHRLMNRQRWLDYWQNIYSRSLSVLPYFLLLPQFISGQINLGGLMKSRQAFMLVSNNLSWFIYKYDELAELAAVIDRLYEFHQLTEQRPTNKPKNCQHAVQVADASIRTPDNKIILENLNFHVSPGKWLLLKGYSGAGKTTLLKTLSHCWPWFKGDISSPADSWYVSQTPLIKTGLLKEIICKALPLPVDDKSLSEVLHQVGLGKLAARIHDHDRWGDILSSGEKQRIALARLILRRPKWIFLDETTSHLEEQEAIRLLRLVREKLPTSGVIMVTHQPGVWNLADDICDISAVL

SEQ ID NO: 221 - protein, 547 aa, Escherichia coli (strain K12)
MELLVLVWRQYRWPFISVMALSLASAALGIGLIAFINQRLIETADTSLLVLPEFLGLLLLLMAVTLGSQLALTTLGHHFVYRLRSEFIKRILDTHVERIEQLGSASLLAGLTSDVRNITIAFVRLPELVQGIILTIGSAAYLWMLSGKMLLVTAIWMAITIWGGFVLVARVYKHMATLRETEDKLYTDFQTVLEGRKELTLNRERAEYVFNNLYIPDAQEYRHHIIRADTFHLSAVNWSNIMMLGAIGLVFWMANSLGWADTNVAATYSLTLLFLRTPLLSAVGALPTLLTAQVAFNKLNKFALAPFKAEFPRPQAFPNWQTLELRNVTFAYQDNAFSVGPINLTIKRGELLFLIGGNGSGKSTLAMLLTGLYQPQSGEILLDGKPVSGEQPEDYRKLFSAVFTDVWLFDQLLGPEGKPANPQLVEKWLAQLKMAHKLELSNGRIVNLKLSKGQKKRVALLLALAEERDIILLDEWAADQDPHFRREFYQVLLPLMQEMGKTIFAISHDDHYFIHADRLLEMRNGQLSELTGEERDAASRDAVARTA

SEQ ID NO: 222 - protein, 374 aa, Escherichia coli (strain K12)
MRHLRNIFNLGIKELRSLLGDKAMLTLIVFSFTVSVYSSATVTPGSLNLAPIAIADMDQSQLSNRIVNSFYRPWFLPPEMITADEMDAGLDAGRYTFAINIPPNFQRDVLAGRQPDIQVNVDATRMSQAFTGNGYIQNIINGEVNSFVARYRDNSEPLVSLETRMRFNPNLDPAWFGGVMAIINNITMLAIVLTGSALIREREHGTVEHLLVMPITPFEIMMAKIWSMGLVVLVVSGLSLVLMVKGVLGVPIEGSIPLFMLGVALSLFATTSIGIFMGTIARSMPQLGLLVILVLLPLQMLSGGSTPRESMPQMVQDIMLTMPTTHFVSLAQAILYRGAGFEIVWPQFLTLMAIGGAFFTIALLRFRKTIGTMA

SEQ ID NO: 223 - protein, 397 aa, Escherichia coli (strain K12)
MNKNRGFTPLAVVLMLSGSLALTGCDDKQAQQGGQQMPAVGVVTVKTEPLQITTELPGRTSAYRIAEVRPQVSGIILKRNFKEGSDIEAGVSLYQIDPATYQATYDSAKGDLAKAQAAANIAQLTVNRYQKLLGTQYISKQEYDQALADAQQANAAVTAAKAAVETARINLAYTKVTSPISGRIGKSNVTEGALVQNGQATALATVQQLDPIYVDVTQSSNDFLRLKQELANGTLKQENGKAKVSLITSDGIKFPQDGTLEFSDVTVDQTTGSITLRAIFPNPDHTLLPGMFVRARLEEGLNPNAILVPQQGVTRTPRGDATVLVVGADDKVETRPIVASQAIGDKWLVTEGLKAGDRVVISGLQKVRPGVQVKAQEVTADNNQQAASGAQPEQSKS

SEQ ID NO: 224 - protein, 385 aa, Escherichia coli (strain K12)
MTKHARFFLLPSFILISAALIAGCNDKGEEKAHVGEPQVTVHIVKTAPLEVKTELPGRTNAYRIAEVRPQVSGIVLNRNFTEGSDVQAGQSLYQIDPATYQANYDSAKGELAKSEAAAAIAHLTVKRYVPLVGTKYISQQEYDQAIADARQADAAVIAAKATVESARINLAYTKVTAPISGRIGKSTVTEGALVTNGQTTELATVQQLDPIYVDVTQSSNDFMRLKQSVEQGNLHKENATSNVELVMENGQTYPLKGTLQFSDVTVDESTGSITLRAVFPNPQHTLLPGMFVRARIDEGVQPDAILIPQQGVSRTPRGDATVLIVNDKSQVEARPVVASQAIGDKWLISEGLKSGDQVIVSGLQKARPGEQVKATTDTPADTASK

SEQ ID NO: 225 - protein, 415 aa, Escherichia coli (strain K12)
MKGSYKSRWVIVIVVVIAAIAAFWFWQGRNDSRSAAPGATKQAQQSPAGGRRGMRSGPLAPVQAATAVEQAVPRYLTGLGTITAANTVTVRSRVDGQLIALHFQEGQQVKAGDLLAEIDPSQFKVALAQAQGQLAKDKATLANARRDLARYQQLAKTNLVSRQELDAQQALVSETEGTIKADEASVASAQLQLDWSRITAPVDGRVGLKQVDVGNQISSGDTTGIVVITQTHPIDLVFTLPESDIATVVQAQKAGKPLVVEAWDRTNSKKLSEGTLLSLDNQIDATTGTIKVKARFNNQDDALFPNQFVNARMLVDTEQNAVVIPTAALQMGNEGHFVWVLNSENKVSKHLVTPGIQDSQKVVIRAGISAGDRVVTDGIDRLTEGAKVEVVEAQSATTPEEKATSREYAKKGARS

SEQ ID NO: 226 - protein, 385 aa, Escherichia coli (strain K12)
MNRRRKLLIPLLFCGAMLTACDDKSAENAAAMTPEVGVVTLSPGSVNVLSELPGRTVPYEVAEIRPQVGGIIIKRNFIEGDKVNQGDSLYQIDPAPLQAELNSAKGSLAKALSTASNARITFNRQASLLKTNYVSRQDYDTARTQLNEAEANVTVAKAAVEQATINLQYANVTSPITGVSGKSSVTVGALVTANQADSLVTVQRLDPIYVDLTQSVQDFLRMKEEVASGQIKQVQGSTPVQLNLENGKRYSQTGTLKFSDPTVDETTGSVTLRAIFPNPNGDLLPGMYVTALVDEGSRQNVLLVPQEGVTHNAQGKATALILDKDDVVQLREIEASKAIGDQWVVTSGLQAGDRVIVSGLQRIRPGIKARAISSSQENASTESKQ

SEQ ID NO: 227 - protein, 390 aa, Escherichia coli (strain K12)
MSANAETQTPQQPVKKSGKRKRLLLLLTLLFIIIAVAIGIYWFLVLRHFEETDDAYVAGNQIQIMSQVSGSVTKVWADNTDFVKEGDVLVTLDPTDARQAFEKAKTALASSVRQTHQLMINSKQLQANIEVQKIALAKAQSDYNRRVPLGNANLIGREELQHARDAVTSAQAQLDVAIQQYNANQAMILGTKLEDQPAVQQAATEVRNAWLALERTRIISPMTGYVSRRAVQPGAQISPTTPLMAVVPATNMWVDANFKETQIANMRIGQPVTITTDIYGDDVKYTGKVVGLDMGTGSAFSLLPAQNATGNWIKVVQRLPVRIELDQKQLEQYPLRIGLSTLVSVNTTNRDGQVLANKVRSTPVAVSTAREISLAPVNKLIDDIVKANAG

SEQ ID NO: 228 - protein, 493 aa, Escherichia coli (strain K12)
MKKLLPILIGLSLSGFSSLSQAENLMQVYQQARLSNPELRKSAADRDAAFEKINEARSPLLPQLGLGADYTYSNGYRDANGINSNATSASLQLTQSIFDMSKWRALTLQEKAAGIQDVTYQTDQQTLILNTATAYFNVLNAIDVLSYTQAQKEAIYRQLDQTTQRFNVGLVAITDVQNARAQYDTVLANEVTARNNLDNAVEQLRQITGNYYPELAALNVENFKTDKPQPVNALLKEAEKRNLSLLQARLSQDLAREQIRQAQDGHLPTLDLTASTGISDTSYSGSKTRGAAGTQYDDSNMGQNKVGLSFSLPIYQGGMVNSQVKQAQYNFVGASEQLESAHRSVVQTVRSSFNNINASISSINAYKQAVVSAQSSLDAMEAGYSVGTRTIVDVLDATTTLYNAKQELANARYNYLINQLNIKSALGTLNEQDLLALNNALSKPVSTNPENVAPQTPEQNAIADGYAPDSPAPVVQQTSARTTTSNGHNPFRN

SEQ ID NO: 229 - protein, 110 aa, Escherichia coli (strain K12)
MNPYIYLGGAILAEVIGTTLMKFSEGFTRLWPSVGTIICYCASFWLLAQTLAYIPTGIAYAIWSGVGIVLISLLSWGFFGQRLDLPAIIGMMLICAGVLIINLLSRSTPH

SEQ ID NO: 230 - protein, 410 aa, Escherichia coli (strain K12)
MPRFFTRHAATLFFPMALILYDFAAYLSTDLIQPGIINVVRDFNADVSLAPAAVSLYLAGGMALQWLLGPLSDRIGRRPVLITGALIFTLACAATMFTTSMTQFLIARAIQGTSICFIATVGYVTVQEAFGQTKGIKLMAIITSIVLIAPIIGPLSGAALMHFMHWKVLFAIIAVMGFISFVGLLLAMPETVKRGAVPFSAKSVLRDFRNVFCNRLFLFGAATISLSYIPMMSWVAVSPVILIDAGSLTTSQFAWTQVPVFGAVIVANAIVARFVKDPTEPRFIWRAVPIQLVGLSLLIVGNLLSPHVWLWSVLGTSLYAFGIGLIFPTLFRFTLFSNKLPKGTVSASLNMVILMVMSVSVEIGRWLWFNGGRLPFHLLAVVAGVIVVFTLAGLLNRVRQHQAAELVEEQ

SEQ ID NO: 231 - protein, 410 aa, Escherichia coli (strain K12)
MQNKLASGARLGRQALLFPLCLVLYEFSTYIGNDMIQPGMLAVVEQYQAGIDWVPTSMTAYLAGGMFLQWLLGPLSDRIGRRPVMLAGVVWFIVTCLAILLAQNIEQFTLLRFLQGISLCFIGAVGYAAIQESFEEAVCIKITALMANVALIAPLLGPLVGAAWIHVLPWEGMFVLFAALAAISFFGLQRAMPETATRIGEKLSLKELGRDYKLVLKNGRFVAGALALGFVSLPLLAWIAQSPIIIITGEQLSSYEYGLLQVPIFGALIAGNLLLARLTSRRTVRSLIIMGGWPIMIGLLVAAAATVISSHAYLWMTAGLSIYAFGIGLANAGLVRLTLFASDMSKGTVSAAMGMLQMLIFTVGIEISKHAWLNGGNGLFNLFNLVNGILWLSLMVIFLKDKQMGNSHEG

1. An engineered cell for producing a cannabinoid or derivative thereof, wherein the engineered cell comprises
one or more of the following modifications:
(i) express an exogenous nucleic acid sequence encoding an olivetol synthase;
(ii) express an exogenous nucleic acid sequence encoding an olivetolic acid cyclase;
(iii) express an exogenous nucleic acid sequence encoding a prenyltransferase; and
one or more of the following modifications:
(iv) express one or more exogenous nucleic acid sequences or overexpress one or more endogenous genes encoding a protein having an ABC transporter permease activity;
(v) express one or more exogenous nucleic acid sequences or overexpress one or more endogenous genes encoding a protein having an ABC transporter ATP-binding protein;
(vi) express one or more exogenous nucleic acids sequences or overexpress one or more endogenous genes that encodes a protein that is at least 60% identical to: the blc gene product of SEQ ID NO: 147, the ybhG gene product of SEQ ID NO: 116, or the ydhC gene product of SEQ ID NO: 148, or a protein of one of SEQ ID NOs: 210-214;
(vii) express one or more exogenous nucleic acids sequences or overexpress one or more endogenous genes that encodes a protein that is at least 60% identical to the mlaD gene product of SEQ ID NO: 149, the mlaE gene product of SEQ ID NO: 150, or the mlaF gene product of SEQ ID NO: 151;
(viii) express one or more exogenous nucleic acid sequences or overexpress one or more endogenous genes encoding a protein having a siderophore receptor protein activity;
(ix) a disruption of or downregulation in the expression of a regulator of expression of one or more endogenous genes encoding a protein having an ABC transporter permease activity, a protein having an ABC transporter ATP-binding protein activity, a blc gene, a ybhG protein, a ydhC protein, an EmrB/QacA subfamily drug resistance transporter, a mlaD protein, mlaE protein, mlaF protein, or a protein having a siderophore receptor protein activity;
(x) express an exogenous nucleic acid encoding a multi-domain protein having acetyl-CoA carboxylase activity (MD-ACC);
(xi) overexpress one or more endogenous genes encoding acetyl-CoA carboxyltransferase subunit α, biotin carboxyl carrier protein, biotin carboxylase, or acetyl-CoA carboxyltransferase subunit β, or express one or more exogenous genes encoding acetyl-CoA carboxyltransferase, biotin carboxyl carrier protein, or biotin carboxylase;
(xii) disruption of or downregulation in the expression of an endogenous gene encoding a protein having (acyl-carrier-protein)S-malonyltransferase activity, an endogenous gene encoding a protein having 3-hydroxypalmitoyl-(acyl-carrier-protein) dehydratase activity, or both;
(xiii) express an exogenous nucleic acid sequence or overexpress an endogenous gene encoding a protein having fatty acyl-CoA ligase activity, or both;
(xiv) disruption of or downregulation in the expression of at least one endogenous gene encoding a protein having acyl-CoA dehydrogenase activity or enoyl-CoA hydratase activity;
(xv) a disruption or downregulation in the expression of at least one endogenous gene encoding a protein having acyl-CoA esterase/thioesterase activity;
(xvi) disruption of or downregulation in the expression of at least one endogenous gene encoding a repressor of transcription of one or more genes required for fatty acid beta-oxidation or an upregulator of fatty acid biosynthesis in combination with disruption or downregulation of one or more endogenous genes encoding one or more proteins of fatty acid beta-oxidation pathway;
(xvii) express one or more exogenous nucleic acid sequences or overexpress one or more endogenous genes encoding a protein having isopentenyl phosphate kinase activity, isoprenol diphosphokinase activity, prenol kinase activity, prenol diphosphokinase activity, dimethylallyl phosphate kinase activity, or isopentenyl diphosphate isomerase activity;
(xviii) express an exogenous nucleic acid sequence or overexpress an endogenous gene encoding a protein having GPP synthase activity;
(xix) express one or more exogenous nucleic acid sequences or overexpressing one or more endogenous genes encoding one or more enzymes of MVA pathway, MEP pathway, or a non-MVA, non-MEP pathway;
(xx) express an exogenous nucleic acid sequence or overexpress an endogenous gene encoding a biotin-(acetyl-CoA carboxylase) ligase;
(xxi) overexpress an endogenous gene encoding an isopentenyl-diphosphate delta-isomerase or express an exogenous nucleic acid sequence encoding an isopentenyl-diphosphate delta-isomerase;
(xxii) overexpress an endogenous genes encoding a hydroxyethylthiazole kinase or express an exogenous nucleic acid sequence encoding a hydroxyethylthiazole kinase;
(xxiii) express an exogenous nucleic acid sequence encoding a Type III pantothenate kinase or overexpress an endogenous gene encoding a Type III pantothenate kinase;
(xxiv) a disruption of or downregulation in the expression of at least one endogenous gene encoding a phosphatase selected from the group consisting of ADP-sugar pyrophosphatase, dihydroneopterin triphosphate diphosphatase, pyrimidine deoxynucleotide diphosphatase, pyrimidine pyrophosphate phosphatase, and Nudix hydrolase;
(xxv) express one or more exogenous nucleic acid sequences or overexpress one or more endogenous genes encoding a protein having a resistance-nodulation-cell division (FENNY) transporter;
(xxvi) express one or more exogenous nucleic acid sequences or overexpress one or more endogenous genes encoding a protein having a prokaryotic small multidrug (SMR) transporter; and
(xxvii) express one or more exogenous nucleic acid sequences or overexpress one or more endogenous genes encoding a protein that is a member of the major facilitator superfamily (MFS),
wherein the engineered cell produces a cannabinoid or derivative thereof.

2. The engineered cell of claim 1, wherein the MD-ACC has an enzymatic activity of EC 6.4.1.2.

3. The engineered cell of claim 1, wherein the MD-ACC is a fungal MD-ACC, optionally wherein the fungal MD-ACC is derived from Mucor spp, Rhizopus spp. Aspergillus spp, Saccharomyces spp., or Yarrowia sp.

4. (canceled)

5. The engineered cell of claim 1, wherein the MD-ACC has a sequence that is at least 60%, at least 65%, at least 70%, at least 75%, at least 80%, at least 85%, at least 90%, at least 95%, at least 97%, or at least 99% identical to any one of the sequences of SEQ ID NOs: 1-100 and 208-209.

6. The engineered cell of claim 1,
wherein the MD-ACC has a sequence that is at least 60% identical to SEQ ID NO: 1, optionally wherein the MD-ACC protein comprises the sequence of SEQ ID NO: 1; or
wherein the MD-ACC is encoded by a nucleic acid sequence that is at least 60% identical to SEQ ID NO: 101, optionally wherein the MD-ACC is encoded by a nucleic acid sequence comprising SEQ ID NO: 101.

7-9. (canceled)

10. The engineered cell of claim 1, wherein the exogenous nucleic acid encoding a multi-domain protein having acetyl-CoA carboxylase activity (MD-ACC) is heterologous to the cell.

11. The engineered cell of claim 1, wherein the protein having ABC transporter permease activity has an enzymatic activity of EC 7.6.2.2,
optionally wherein the protein having ABC transporter permease activity is at least 60% identical to SEQ ID NO: 113, optionally encoded by ybhS gene;
optionally wherein the protein having ABC transporter permease activity is at least 60% identical to SEQ ID NO: 115, optionally encoded by ybhR gene;
optionally wherein the protein having ABC transporter permease activity is at least 60% identical to SEQ ID NO: 190, optionally encoded by UniProt protein sequence Q8XYF0;
optionally wherein the protein having ABC transporter permease activity is at least 60% identical to SEQ ID NO: 191, optionally encoded by UniProt protein sequence Q8XYE9; or
optionally wherein the protein having multidrug ABC transporter permease activity is at least 60% identical to SEQ ID NO: 114, or optionally encoded by ybhF gene.

12-21. (canceled)

22. The engineered cell of claim 1 wherein the one or more exogenous nucleic acid sequences or the one or more endogenous genes encodes a protein of any one of SEQ ID NOs: 210-214.

23-26. (canceled)

27. The engineered cell of claim 1, wherein the protein having siderophore receptor protein activity is at least 60% identical to SEQ ID NO: 192, optionally having UniProt protein sequence Q8XYF1.

28. (canceled)

29. The engineered cell of claim 1, wherein the cell is engineered for a modification that causes a disruption or downregulation in the expression of an endogenous gene encoding:
(a) a protein having (acyl-carrier-protein)S-malonyltransferase activity, an endogenous gene encoding a protein having 3-hydroxypalmitoyl-(acyl-carrier-protein) dehydratase activity, or both;
(b) a protein having 3-oxoacyl-[acyl-carrier-protein] synthase activity, an endogenous gene encoding a protein having enoyl-[acyl-carrier-protein] reductase activity, or both.
(c) a protein having acyl-CoA dehydrogenase activity or enoyl-CoA hydratase activity;
(d) a protein having acyl-CoA esterase/thioesterase activity; or
(e) a repressor of transcription of one or more genes required for fatty acid beta-oxidation or an upregulator of fatty acid biosynthesis in combination with disruption or downregulation of one or more endogenous genes encoding one or more proteins of fatty acid beta-oxidation pathway.

30-41. (canceled)

42. The engineered cell of claim 1, wherein the cell is engineered to express an exogenous nucleic acid sequence or overexpress an endogenous gene encoding a protein having fatty acyl-CoA ligase activity, optionally wherein the protein having fatty acyl-CoA ligase activity has an enzymatic activity of EC 6.2.1.3, optionally wherein the exogenous nucleic acid sequence or the endogenous gene encodes a protein at least 60% identical to SEQ ID NO: 104, optionally wherein the exogenous nucleic acid sequence or the endogenous gene is a fadD gene or a variant thereof, optionally wherein the engineered cell increases the availability of alkanoyl-CoA as compared to a control cell that is substantially identical to the engineered cell with the exception that the control cell does not comprise one or more of such modifications.

43-65. (canceled)

66. The engineered cell of claim 1, wherein the cell is engineered to:
(a) express an exogenous nucleic acid sequence or overexpress an endogenous gene encoding a protein having isopentenyl phosphate kinase activity, optionally wherein the protein having isopentenyl phosphate kinase activity has an enzymatic activity of EC 2.7.4.26, optionally wherein protein having isopentenyl phosphate kinase activity encodes a protein having at least 60% amino acid sequence identity with SEQ ID NO: 110,
(b) express an exogenous nucleic acid sequence or overexpress an endogenous gene encoding a protein having GPP synthase activity, optionally wherein the protein having geranyl pyrophosphate (GPP) synthase activity has an enzymatic activity of EC 2.5.1, optionally encoding a protein at least 60% identical to SEQ ID NO: 111 or 112, optionally encoded by an IspA gene or an IdsA gene,
(c) express an exogenous nucleic acid sequence or overexpress an endogenous gene encoding a protein having hydroxyethylthiazole kinase activity;
(d) express an exogenous nucleic acid sequence or overexpress an endogenous gene encoding a protein having isopentenyl-diphosphate delta-isomerase activity;
(e) express one or more exogenous nucleic acid sequences or overexpress one or more endogenous genes encoding protein(s) having prenol kinase activity, prenol diphosphokinase activity, isoprenol kinase activity, isoprenol diphosphokinase activity, dimethylallyl phosphate kinase activity, isopentenyl diphosphate kinase activity, or isopentenyl diphosphate isomerase activity; or
(f) a combination of one or more of (a)-(e).

67-73. (canceled)

74. The engineered cell of claim 1, wherein the cell is engineered to express an exogenous nucleic acid sequence or overexpress an endogenous gene encoding a protein having Type III pantothenate kinase activity, optionally wherein the protein having Type III pantothenate kinase activity has an enzymatic activity of EC:2.7.1.33, optionally encoding a protein at least 60% identical to SEQ ID NO: 200, optionally encoded by a coaX gene.

75-78. (canceled)

79. The engineered cell of claim 1, wherein the cell is engineered to express one or more endogenous genes, wherein the native promoter of at least one of the one or more endogenous genes is replaced with a promoter that alters the expression of the genes relative to their expression in a control cell with the native promoter.

80-82. (canceled)

83. The engineered cell of claim 1, wherein the cell is engineered to express an exogenous nucleic acid sequence or overexpress an endogenous gene encoding a protein having biotin ligase activity, optionally wherein the protein having biotin ligase activity has an enzymatic activity of EC:6.3.4.15, optionally encoded by a BirA gene.

84. (canceled)

85. (canceled)

86. The engineered cell of claim 1, wherein the cell is selected from the group consisting of bacteria, fungi, yeast, cyanobacteria, and algae, optionally wherein the cell is a bacterial cell, optionally the bacterial cell being E. coli.

87-89. (canceled)

90. The engineered cell of claim 1, wherein the cell is engineered to express one or more exogenous genes or overexpress one or more endogenous genes, and wherein one or more exogenous or endogenous gene is a non-natural variant of the naturally occurring endogenous or exogenous gene, optionally wherein the non-natural variant of the exogenous or endogenous gene comprise one or more amino acid substitutions, insertions, or deletions as compared to the naturally occurring genes.

91. (canceled)

92. The engineered cell of claim 1, wherein the cannabinoid is cannabigerolic acid (CBGA), tetrahydrocannabivarin (THCV), tetrahydrocannabivarinic acid (THCVA), cannabidivarin (CBDV), cannabidivarinic acid (CBDVA), cannabinol (CBN), cannabinolic acid (CBNA), cannabidiol (CBD), cannabidiolic acid (CBDA), cannabichromene (CBC), cannabichromenic acid (CBCA), cannabigerivarin (CBGV), cannabigerivarinic acid (CBGVA), cannabigerol (CBG), Cannabichromevarin (CBCV), Cannabichromevarinic acid (CBCVA), tetrahydrocannabinol (THC), tetrahydrocannabinolic acid (THCA), analogs, or derivatives thereof, or combinations thereof.

93. (canceled)

94. A method for producing a product having malonyl-CoA as a metabolic intermediate in a microbial production pathway of the product, the method comprising
(a) combining one or more carbon sources, an engineered cell of claim 1, and a microorganism cell culture medium to produce a cell culture; and
(b) incubating the cell culture produced in step (a) under conditions that produce the product,
the method optionally further comprising concentrating the cannabinoid product or derivative thereof from the culture media to produce a cannabinoid concentrate, wherein the cannabinoid or derivative thereof is present in a higher concentration in the cannabinoid concentrate than in the culture media.

95-99. (canceled)

100. A composition comprising a cannabinoid produced or derivative thereof by the method of claim 94, optionally wherein the cannabinoid or derivative thereof is present at a concentration of at least 5% (w/v), at a concentration in the range of 5%-99% (w/v), at a concentration in the range of 5%-90% (w/v), or at a concentration in the range of 5%-20% (w/v).

101-105. (canceled)
